(19) United States
(12) Patent Application Publication
(10) Pub. No.: US 2019/0169593 A1
(43) Pub. Date: Jun. 6, 2019

(54) PRODUCTS AND METHODS FOR ASSESSING AND INCREASING KLOTHO PROTEIN LEVELS

(71) Applicant: KLOTHO THERAPEUTICS, INC., Las Vegas, NV (US)

(72) Inventors: Joseph F. Tarsio, Manlius, NY (US); Dinesh Raturi, Eastvale, CA (US); William Ian Ramage, Del Mar, CA (US); James R. Plante, Las Vegas, NV (US)

(21) Appl. No.: 16/208,552

(22) Filed: Dec. 3, 2018

Related U.S. Application Data
(63) Continuation-in-part of application No. PCT/US2017/035755, filed on Jun. 2, 2017.
Application No. PCT/US2017/035755 is a continuation-in-part of application No. PCT/US2017/063149, filed on Nov. 22, 2017.
(60) Provisional application No. 62/344,743, filed on Jun. 2, 2016.
(60) Provisional application No. 62/375,046, filed on Aug. 15, 2016.
(60) Provisional application No. 62/401,600, filed on Sep. 29, 2016.
(60) Provisional application No. 62/425,237, filed on Nov. 22, 2016.
(60) Provisional application No. 62/456,318, filed on Feb. 8, 2017.
(60) Provisional application No. 62/425,237, filed on Nov. 22, 2016.
(60) Provisional application No. 62/456,318, filed on Feb. 8, 2017.
(60) Provisional application No. 62/595,567, filed on Dec. 6, 2017.
(60) Provisional application No. 62/666,868, filed on May 4, 2018.
(60) Provisional application No. 62/692,195, filed on Jun. 29, 2018.

(51) Int. Cl. C12N 9/96; G01N 33/573; C12N 9/24; C07K 14/765; A23L 33/15; A23L 33/155; A23L 33/13; A23L 33/135; B01D 15/38; B01D 15/34; B01D 15/18

(52) U.S. Cl. CPC C12N 9/96; G01N 33/573; C12N 9/2402; C12Y 302/01031; C07K 14/765; A23L 33/15; A61K 38/00; A23L 33/13; A23L 33/135; B01D 15/3804; B01D 15/34; B01D 15/1871; A23L 33/155

(57) ABSTRACT

Disclosed are products and methods for monitoring Klotho protein levels and for stabilizing Klotho protein in a mammalian blood sample, especially at room temperature or without freezing, for a period of time. Methods of detecting and quantifying Klotho protein levels, particularly endogenous and/or exogenous soluble alpha Klotho protein levels, methods of diagnosing Klotho protein deficiency, and methods of increasing Klotho protein levels or production, particularly endogenous and/or exogenous soluble alpha Klotho protein level(s), expression, or production, in a mammalian subject, and products useful in performing the same, including diagnostic kits and compositions for treating Klotho protein deficiency, are disclosed. Compositions are configured or formulated to augment natural soluble alpha Klotho protein production, attenuate Klotho protein damage or degradation, and/or supplement Klotho protein levels with exogenous, recombinant protein. Treatment methods and uses include administration of the compositions to human or non-human mammalian subjects.

### CROSS-REFERENCE TO RELATED APPLICATIONS

[0001] The present application is a Continuation-in-part of International Application No. PCT/US2017/35755, filed on Jun. 2, 2017, which claims the benefit of and priority to: (i) U.S. Provisional Application No. 62/344,743, filed on Jun. 2, 2016; (ii) U.S. Provisional Application No. 62/375,046, filed on Aug. 15, 2016; (iii) U.S. Provisional Application No. 62/401,600, filed on Sep. 29, 2016; (iv) U.S. Provisional Application No. 62/425,237, filed on Nov. 22, 2016; and (v) U.S. Provisional Application No. 62/456,318, filed on Feb. 8, 2017. The present application is also a Continuation-in-part of International Application No. PCT/US17/63149, filed on Nov. 22, 2017, which claims the benefit of and priority to: (i) U.S. Provisional Application No. 62/425,237, filed on Nov. 22, 2016; and (ii) U.S. Provisional Application No. 62/456,318, filed on Feb. 8, 2017. The present application also claims the benefit of and priority to: (i) U.S. Provisional Application No. 62/595,567, filed on Dec. 6, 2017; (ii) U.S. Provisional Application No. 62/666,868, filed on May 4, 2018; and (iii) U.S. Provisional Application No. 62/692,195, filed on Jun. 29, 2018. The entirety of each of the foregoing applications is incorporated herein by specific reference.

### BACKGROUND

### 1. Technical Field

[0002] The present disclosure relates to assessing and increasing Klotho protein levels in a patient. In particular, the present disclosure relates to products and methods for monitoring, detecting, and/or qualifying the level of endogenous and/or exogenous Klotho protein and for diagnosing Klotho protein deficiency in a human or non-human animal (e.g., mammalian) subject, and to the production, purification, and administration of pharmaceutical or nutraceutical compositions for increasing Klotho protein levels in the subject.

### 2. Related Technology

[0003] Klotho (or alpha-Klotho, α-Klotho, etc.) is a recently characterized protein encoded by the KL (or klotho) gene, located on human chromosome 13. Two transcripts that arise from a single klotho gene through alternative RNA splicing have been identified. See FIGS. 1 and 2. The first transcript is predicted to encode Klotho isoform 1—a full-length, 1,012 amino acid, single-pass transmembrane-membrane protein, with a short cytoplasmic tail (human residues 1003-1012), a transmembrane (TM) domain (human residues 982-1002), and extracellular region or domain (human residues 1-981) comprising two (largely) homologous (internal repeat) domains (termed KL1 (human residues 56-506, which is 450 residues long) and KL2 (human residues 515-953, which is 438 residues long), which each share 20%-40% amino acid sequence homology to β-glucosidases, but may lack similar levels of glucosidase catalytic activity), and a signal sequence (SS) domain (human residues 1-33). The SS, KL1, and KL2 domain-containing extracellular region (human residues 1-981) may be enzymatically cleaved by α/β-secretases, and released into the circulatory stream as a 130 kDa circulating protein, termed soluble klotho (or sKlotho, s-Klotho, alpha soluble Klotho, etc.). The extracellular region can also be cleaved into separate 68 kDa protein (KL1+SS) and 64 kDa protein (KL2).

[0004] The second transcript, a splicing variant of alpha-klotho mRNA, encodes a second isoform of Klotho protein corresponding mainly to the KL1 domain. The internal splice donor site is thought to be located in exon 3 of the klotho gene. The resultant alternatively spliced transcript contains a 50 bp insertion after exon 3 (FIG. 1; gray), with an in-frame translation stop codon at the end thereof. The expressed protein product is secreted into the circulation and is termed secreted Klotho (or Klotho isoform 2), which differs from the canonical sequence of isoform 1 at amino acid residues 535-549: DTTLSQFTDLNVYLW→SQLTKPISSLTKPYH, and with amino acid residues 550-1012 missing.

[0005] Accordingly, there may be a number of different Klotho proteins in the circulation at any given time, depending on gene expression, RNA splicing, and enzymatic cleavage. Despite the existence of various forms of alpha-Klotho protein, only the full length, membrane-bound, isoform 1 is known to form a complex with fibroblast growth factor (FGF) receptors and functions as an obligatory co-receptor for FGF23→a bone-derived hormone that induces phosphate excretion into urine and which has a regulatory role on Pᵢ and vitamin D metabolism.

[0006] Klotho is highly expressed in the kidney, brain, and to a lesser extent in other organs, and may also be found in the blood, cerebrospinal fluid and urine of mammals. Circulating levels of soluble Klotho proteins in mammals, including humans, are thought to decrease with age. In addition, Klotho-deficient mice exhibit accelerated aging phenotypes, whereas over-expression of klotho in mice has been shown to extend lifespan. In addition, Klotho has been implicated in a number of cellular processes related to aging. In light of the foregoing, a developing hypothesis states that soluble Klotho may function as an anti-aging compound in the human body.

[0007] Aging is an inevitable and progressive biological process resulting in dysfunction and destruction of almost all tissues and organs, ultimately resulting in death. The aging of the human body, for instance, is associated with the decline of cellular function, which can lead to the development of a variety of diseases. Aging is thought to be driven by a tightly regulated and complex interplay between genetic and acquired factors and is typically characterized by an increase in senescence, a quantitative and qualitative decrease in stem cells, and abnormal structure at tissue levels.

[0008] As the so-called “baby boomers” generation continues to advance in age, the population of aging individuals (e.g., age 60-65) is rapidly increasing globally. The increased demand for health care for this aging population places significant financial burden on any healthcare system. Recombinant klotho proteins may provide promising therapeutic agents to counter age-related health conditions. To date, all relevant treatment data related to Klotho is pre-clinical, research trials in animal models. Developing strategies and health intervention products and methods based on (i) the production and/or purification (e.g., to substantial homogeneity) of recombinant s-Klotho proteins or protein variants and (ii) the administration of recombinant s-Klotho proteins or protein variants and/or s-Klotho protein level-increasing health supplements to subjects, especially humans and/or within an increasing aging population, may help to ameliorate this situation.

[0009] Currently, there is not a product or method for providing an exogenous form of human Klotho protein, such as recombinant soluble human alpha-Klotho protein or protein variant, suitable for human use, especially protein that is Current Good Manufacturing Practice (cGMP) regulation compliant, as determined and enforced by the U.S. Food and Drug Administration (FDA), whether alone or in combination with one or more additional active components.

[0010] Likewise, there is not currently a product or method for (naturally) increasing endogenous Klotho protein levels or protein production, in a safe and effective manner, especially a product that complies with the Dietary Supplement Health and Education Act of 1994 (DSHEA) or that is Current Good Manufacturing Practice (cGMP) regulation compliant (e.g., as determined and enforced by the U.S. Food and Drug Administration (FDA)), whether alone or in combination with one or more additional active components, drugs, pharmaceuticals, or nutraceuticals.

[0011] Moreover, there is not currently a product (e.g., kit or system) or method for efficiently, reliably, reproducibly, practically, and/or (commercially or economically) viably monitoring Klotho protein levels, particularly a product or method for on-demand and/or real-time monitoring and/or quantification of endogenous and/or exogenous Klotho protein levels, and more particularly endogenous and/or exogenous soluble alpha Klotho protein or protein variant levels, or for diagnosing Klotho protein deficiency, particularly serum soluble Klotho protein deficiency, in human and non-human animals.

[0012] There is also not currently a suitable, large scale method for efficiently, reliably, reproducibly, practically, and/or (commercially or economically) viably producing and purifying recombinant Klotho proteins, particularly, pharmaceutical grade recombinant Klotho proteins, including recombinant Klotho protein fragments and recombinant Klotho fusion proteins.

### BRIEF SUMMARY

[0013] Embodiments of the present disclosure solve one or more of the foregoing or other problems in the art with products and methods for assessing and increasing Klotho protein levels in a patient. Some Embodiments include (1) compositions and methods for stabilizing Klotho protein in human or non-human animal (e.g., mammalian) blood or serum, (2) compositions and methods for monitoring, detecting, and/or quantifying Klotho protein level(s), particularly endogenous and/or exogenous soluble alpha Klotho protein level(s), and/or for diagnosing Klotho protein deficiency in a human or non-human animal (e.g., mammalian) subject, and to products useful in performing the same, (3) pharmaceutical or nutraceutical compositions for increasing Klotho protein levels in the subject. Some embodiments include Klotho protein(s), or fragment(s) or variant(s) thereof, as a therapeutic agent, and more particularly, cGMP-grade, human (or non-human) recombinant soluble alpha-Klotho protein(s), or fragment(s) or variant(s) thereof, or a (pharmaceutical) composition comprising the same. Some embodiments include products and/or methods for manufacturing and administering (recombinant) Klotho protein(s), or fragment(s) or variant(s) thereof, to a human or non-human subject, and particularly for increasing serum soluble Klotho protein levels in the subject. Some embodiments include a nutraceutical or health supplement composition for increasing serum soluble Klotho protein levels in the subject. In particular, some embodiments include products that, when administered to the subject, cause an increase in Klotho protein (particularly endogenous soluble alpha Klotho protein) level(s), expression, or production, in the subject, and (4) methods of purifying recombinant Klotho proteins, particularly pharmaceutical grade recombinant Klotho proteins, recombinant Klotho protein fragments, and recombinant Klotho fusion proteins.

[0014] Various embodiments include a composition. The composition can comprise (i) one or more recombinant human Klotho proteins, protein fragments, and/or protein variants, expression nucleic acid constructs and/or vectors, cell lines and/or cell suspension cultures, and/or (ii) one or more ingredients that, when administered to the subject, cause or induce an increase Klotho protein level(s), expression, or production, particularly endogenous soluble alpha Klotho protein level(s), expression, or production, in the subject. Certain embodiments include methods of manufacturing, purifying, and administering a composition of the present disclosure to the (human or non-human animal) subjects. Some embodiments include methods for increasing Klotho protein (particularly (exogenous and/or endogenous) soluble alpha Klotho protein) level(s), expression, or production, in the subject. Some embodiments include products (e.g., diagnostic kits) and/or methods for monitoring, detecting, and/or quantifying Klotho protein level(s), particularly (endogenous and/or exogenous) soluble alpha Klotho protein level(s), and/or for diagnosing Klotho protein deficiency in the subject.

[0015] Some embodiments of the present disclosure can include one or more of: a recombinant human alpha soluble Klotho protein, protein fragment, and/or protein variant (e.g., cGMP-grade human recombinant soluble alpha-Klotho protein, protein fragment, and/or protein variant); a composition (e.g., therapeutic composition, pharmaceutical composition, medicament, formulation, etc.) comprising a recombinant human alpha soluble Klotho protein, protein fragment, and/or protein variant; a composition comprising a recombinant human alpha soluble Klotho protein and a (pharmaceutically-acceptable) vehicle (e.g., a carrier or excipient); a composition comprising a recombinant human alpha soluble Klotho protein and at least one additional (active) ingredient; a nucleic acid construct or vector that encodes a recombinant human alpha soluble Klotho protein; a cell line that (i) contains a nucleic acid construct or vector that encodes a recombinant human alpha soluble Klotho protein and/or (ii) expresses a recombinant human alpha soluble Klotho protein; a cell suspension culture comprising one or more cells that (each) (i) contain a nucleic acid construct or vector that encodes a recombinant human alpha soluble Klotho protein and/or (ii) express a recombinant human alpha soluble Klotho protein; a method of manufacturing, and optionally purifying, a recombinant human alpha soluble Klotho protein; a method of manufacturing a medicament (or therapeutic composition—i.e., formulation) of recombinant human alpha soluble Klotho protein; a method of administering a recombinant human alpha soluble Klotho protein to a (human or non-human animal) subject; a diagnostic method for determining Klotho protein deficiency in a subject; a method of diagnosing Klotho protein deficiency in a subject; a method of diagnosing a subject as being in need of receiving a recombinant human alpha soluble Klotho protein by administration; a method for evaluating the efficacy and/or determining an effective dosage of the protein to a subject in need thereof; a recombinant human alpha soluble Klotho protein for use in treating a specific medical or other condition in a human or non-human animal (e.g., a non-human mammal); use of a recombinant human alpha soluble Klotho protein for the treatment of a specific medical or other condition in a human or non-human animal; use of a composition comprising a recombinant human alpha soluble Klotho protein for the treatment of a specific medical or other condition in a human or non-human animal; and/or use of a recombinant human alpha soluble Klotho protein in the manufacture of a medicament for the treatment of a specific medical or other condition in a human or non-human animal.

[0016] Some embodiments can include a recombinant Klotho protein, wherein at least a portion of the protein has at least 80% amino acid sequence identity to at least a portion of one of SEQ ID NO: 2 through SEQ ID NO: 70 or SEQ ID NO: 107 through SEQ ID NO: 120 or SEQ ID NO: 125 through SEQ ID NO: 128 or SEQ ID NO: 133 or SEQ ID NO: 152. Some embodiments can include recombinant protein comprising a Klotho protein sequence having at least 80% amino acid sequence identity to at least a portion of one of SEQ ID NO: 2 through SEQ ID NO: 70 or SEQ ID NO: 107 through SEQ ID NO: 120 or SEQ ID NO: 125 through SEQ ID NO: 128 or SEQ ID NO: 133 or SEQ ID NO: 152, preferably one of SEQ ID NO: 52, SEQ ID NO: 54, SEQ ID NO: 66, SEQ ID NO: 125 through SEQ ID NO: 128, SEQ ID NO: 133, and SEQ ID NO: 152 and, optionally at least a portion of an immunoglobulin Fc domain sequence, human serum albumin sequence, His (e.g., 6His) tag sequence, and/or a Twin-Strep tag sequence, with or without an optional linker sequence therebetween. Some embodiments can include two or more recombinant Klotho proteins.

[0017] Some embodiments can include a pharmaceutical composition, comprising a pharmaceutically effective amount of the recombinant Klotho protein as described herein and a pharmaceutically-acceptable carrier. Some embodiments can include a pharmaceutical composition, comprising a pharmaceutically effective amount of a recombinant soluble Klotho protein, at least a portion of the protein having at least 80% amino acid sequence identity to at least a subset of amino acid residues 1-981, 29-981, 34-981, 36-981, 131-981, 1-549, 29-549, 34-549, 36-549, or 131-549 of human alpha Klotho isoform 1 or isoform 2, or at least a portion of one of SEQ ID NO: 2 through SEQ ID NO: 70 or SEQ ID NO: 107 through SEQ ID NO: 120 or SEQ ID NO: 125 through SEQ ID NO: 128 or SEQ ID NO: 133 or SEQ ID NO: 152, and a pharmaceutically-acceptable carrier. Some embodiments can include a pharmaceutical composition, comprising a pharmaceutically-acceptable carrier or excipient and an effective amount of a recombinant protein comprising a Klotho protein sequence having at least 80% amino acid sequence identity to at least a portion of one of SEQ ID NO: 2 through SEQ ID NO: 70 or SEQ ID NO: 107 through SEQ ID NO: 120 or SEQ ID NO: 125 through SEQ ID NO: 128 or SEQ ID NO: 133 or SEQ ID NO: 152, preferably one of SEQ ID NO: 52, SEQ ID NO: 54, SEQ ID NO: 66, SEQ ID NO: 125 through SEQ ID NO: 128, SEQ ID NO: 133, and SEQ ID NO: 152 and, optionally at least a portion of an immunoglobulin Fc domain sequence, human serum albumin sequence, His (e.g., 6His) tag sequence, and/or a Twin-Strep tag sequence, with or without an optional linker sequence therebetween. Some embodiments can include a composition, comprising a pharmaceutically effective amount of two or more recombinant Klotho proteins.

[0018] Some embodiments can include compositions that comprise a therapeutic Klotho protein and at least one other active component, such as a drug, antibody, hormone, human cell, tissue, cellular or tissue-based product (HCT/Ps), etc., and/or methods of administering the same to human or non-human subjects. Combinatorial compositions and methods can be useful for treating subjects having an age-related disorder or condition, a clinical (e.g., metabolic) disorder, a chronic disease, an acute injury, and so forth. The prophylactic administration of combination treatments to subjects with no apparent condition or disorder can also be useful to delay or prevent certain conditions or disorders described herein.

[0019] Some embodiments can include a nucleic acid or nucleic acid construct. For instance, embodiments can include an expression vector or nucleic acid. The nucleic acid can encode a recombinant human alpha soluble Klotho protein, protein fragment, or protein variant. The nucleic acid can encode a native or non-native signaling sequence. For instance, the nucleic acid can encode a non-native signaling sequence upstream of (or N-terminal to) an encoded Klotho protein sequence. Some embodiments can include a nucleic acid construct, comprising a nucleic acid sequence encoding a recombinant protein, the recombinant protein comprising a Klotho protein sequence having at least 80% amino acid sequence identity to at least a portion of one of SEQ ID NO: 2 through SEQ ID NO: 70 or SEQ ID NO: 107 through SEQ ID NO: 120 or SEQ ID NO: 125 through SEQ ID NO: 128 or SEQ ID NO: 133 or SEQ ID NO: 152, preferably one of SEQ ID NO: 52, SEQ ID NO: 54, SEQ ID NO: 66, SEQ ID NO: 125 through SEQ ID NO: 128, SEQ ID NO: 133, and SEQ ID NO: 152; and, optionally at least a portion of an immunoglobulin Fc domain sequence, human serum albumin sequence, His (e.g., 6His) tag sequence, and/or a Twin-Strep tag sequence, with or without an optional linker sequence therebetween.

[0020] Some embodiments can include a cell line. The cell line can comprise (a plurality of) Chinese hamster ovary (CHO) cell(s), HEK-293 cells, or other suitable (protein expression) cell line. In some embodiments, the cells can be dihydrofolate reductase (DHFK)-deficient CHO cells, such as CHO-S cells, or glutamine synthetase (GS)-deficient CHO cells, such as GS−/−CHO cells. The cells can contain one or more (copies of an) exogenous nucleic acid (comprising a transgene or cDNA) that encodes a polypeptide with at least 80% amino acid sequence identity to at least a portion of one of SEQ ID NO: 2 through SEQ ID NO: 70 or SEQ ID NO: 107 through SEQ ID NO: 120 or SEQ ID NO: 125 through SEQ ID NO: 128 or SEQ ID NO: 133 or SEQ ID NO: 152. The polypeptide can comprise a human recombinant alpha soluble Klotho protein. The exogenous nucleic acid can include a transgene or cDNA, preferably having at least 80% nucleic acid sequence identity to one of SEQ ID NO: 76 through SEQ ID NO: 106 or SEQ ID NO: 121 through SEQ ID NO: 124. In some embodiments, the nucleic acid can (also) include or encode a promoter (associated with the transgene) and/or an optional (exogenous) enzyme, such as a (functional) dihydrofolate reductase (DHFR) enzyme, (functional) glutamine synthetase (GS) enzyme, etc.

[0021] At least one embodiment includes a suspension cell culture comprising the cell line growing in a liquid medium, preferably comprising a carbon source, a nitrogen source, and/or one or more vitamins, minerals, salts, amino acids, supplements, or additives, such that the cells express the polypeptide encoded by the nucleic acid. The liquid medium can be (human, bovine, fetal bovine, or other) serum-free and/or animal (or animal-derived) protein (component)-free. For instance, the liquid medium can be free of bovine serum albumin, human serum albumin, etc. In some embodiments, the suspension cell culture can comprise a liquid medium, preferably a serum-free and/or animal protein component-free liquid medium, wherein the liquid medium preferably comprises a carbon source, a nitrogen source, and one or more vitamins, minerals, salts, amino acids, supplements, or additives, more preferably wherein the liquid medium lacks hypoxanthine, thymidine, and/or glutamine, and the cell line growing in the liquid medium such that the cells express the polypeptide encoded by the nucleic acid, the polypeptide comprising a recombinant Klotho protein.

[0022] Some embodiments include an extract of or from the cells, the liquid medium, or both of the suspension cell culture, the extract containing a recombinant protein having at least 80% amino acid sequence identity to at least a portion of one of SEQ ID NO: 2 through SEQ ID NO: 70 or SEQ ID NO: 107 through SEQ ID NO: 120 or SEQ ID NO: 125 through SEQ ID NO: 128 or SEQ ID NO: 133 or SEQ ID NO: 152. Certain embodiments include a human recombinant alpha soluble Klotho protein-containing extract of or from cells, liquid medium, or both (e.g., of the suspension cell culture). At least one embodiment includes an isolated recombinant protein having at least 80% amino acid sequence identity to at least a portion of one of SEQ ID NO: 2 through SEQ ID NO: 70 or SEQ ID NO: 107 through SEQ ID NO: 120 or SEQ ID NO: 125 through SEQ ID NO: 128 or SEQ ID NO: 133 or SEQ ID NO: 152.

[0023] Some embodiments can include a method of manufacturing recombinant Klotho protein (e.g., a recombinant human alpha soluble Klotho protein). Illustrative methods can comprise producing a recombinant Klotho protein in, for example, Chinese hamster ovary (CHO) cells or HEK-293 cells, preferably in dihydrofolate reductase (DHFR)-deficient CHO cells, more preferably in CHO-S cells, or preferably in glutamine synthetase (GS)-deficient CHO cells, more preferably in GS−/−CHO cells, the protein preferably having at least 80% amino acid sequence identity to at least a portion of one of SEQ ID NO: 2 through SEQ ID NO: 70 or SEQ ID NO: 107 through SEQ ID NO: 120 or SEQ ID NO: 125 through SEQ ID NO: 128 or SEQ ID NO: 133 or SEQ ID NO: 152.

[0024] In some embodiments, the manufacturing method can include growing the cells in a liquid medium, producing the recombinant soluble Klotho protein in the cells, and/or purifying a recombinant soluble Klotho protein-containing extract from the cells, liquid medium, or both. The extract can include at least about 90%, preferably at least about 92%, 93%, 94%, 95%, 96%, 97%, 98%, or 99% dry weight recombinant soluble Klotho protein and/or less than about 1-100 ppm host cell proteins (HCP). The cells can be HEK-293 cells or dihydrofolate reductase (DHFR)-deficient CHO cells, such as CHO-S cells, or glutamine synthetase (GS)-deficient CHO cells, such as GS−/−CHO cells. The produced (expressed) protein can be released (e.g., secreted) from the cells into the liquid medium and/or can have one or more glycans attached thereto.

[0025] The cells can contain one or more exogenous nucleic acids that encode the protein and, optionally, a functional enzyme, such as dihydrofolate reductase enzyme, glutamine synthetase (GS) enzyme, etc. The exogenous nucleic acid can include a promoter (e.g., a strong promoter, weak promoter, etc.), such as a promoter customary or typical for use for expression of exogenous protein in cell. The exogenous nucleic acid can include a transgene or cDNA (e.g., under control of the promoter), preferably having at least 80% nucleic acid sequence identity to one of SEQ ID NO: 76 through SEQ ID NO: 106 or SEQ ID NO: 121 through SEQ ID NO: 124, or any other suitable nucleic acid sequence encoding a Klotho protein as described herein (e.g., S-Klotho variants).

[0026] The method can include introducing, such as by transfection, the exogenous nucleic acid into the cells. The method can include growing the cells in a liquid medium, such as a (human, bovine, fetal bovine, or other) serum-free and/or animal (or animal-derived) protein (component)-free medium. The medium preferably comprises a carbon source, a nitrogen source, and/or one or more vitamins, minerals, salts, amino acids, supplements, or additives, preferably in a bioreactor. Depending on the particular cell line, the method can include introducing an effective amount of methotrexate (MTX), methionine sulphoximine (MSX), or other agent into the liquid medium and/or selecting (e.g., by cell sub-cloning, limited dilution, fluorescence activated cell sorting (FACS), etc.) a suspension culture of viable cells growing in the liquid medium.

[0027] In some embodiments, selection and/or gene amplification can be performed by culturing the transfected cells in a selection medium, such as a medium lacking hypoxanthine and/or thymidine (e.g., -HT medium), glutamine, etc. In at least one embodiment, a low concentration(s) of MTX can be added or used to amplify the transfected nucleic acid (or gene(s) thereof) and, thereby, select for increased protein expression (e.g., in DHFR-deficient cells transfected with a DHFR transgene). Alternatively (or in addition), selection and/or gene amplification can be performed by adding MSX (an inhibitor of (endogenous) glutamine synthetase (GS)) to suspension cultures of cells having at least one (exogenous) glutamine synthetase (GS) transgene.

[0028] The method can include sub-culturing surviving cells or cultures (e.g., MTX-resistant and/or MSX-resistant cells or cultures). The selected suspension culture and/or selected cells can have or exhibit an increased production of the protein (e.g., by the cell), an increased concentration of the protein (e.g., in the liquid medium), and/or an increased copy number of the exogenous nucleic acid (e.g., per cell) (e.g., as compared to a non-selected suspension culture or cell).

[0029] The liquid medium can also include an effective amount of MTX and/or MSX in some embodiments. The suspension culture (or cells thereof) can (be selected to): exhibit an increased production of the protein (e.g., by the cells); exhibit an increased concentration of the protein (e.g., in the liquid medium); secrete the protein (e.g., into the liquid medium); and/or have an increased copy number of the exogenous nucleic acid (e.g., per cell), preferably as compared to a non-selected suspension culture. The protein can have one or more glycans attached thereto.

[0030] Some embodiments of the present disclosure relate to compositions configured or formulated to augment, improve, or increase natural soluble alpha Klotho protein production. Some embodiments include a composition or method for increasing (endogenous) Klotho protein levels in a subject. Some embodiments include a (nutraceutical or health supplement) composition for increasing Klotho protein levels, particularly serum soluble Klotho protein levels, in a subject. Some embodiments include products that, when administered to the subject, cause an increase in Klotho protein level(s), expression, or production, particularly endogenous soluble alpha Klotho protein level(s), expression, or production, in the subject.

[0031] Some embodiments of the present disclosure relate to compositions configured or formulated to attenuate Klotho protein damage or degradation. Some embodiments of the present disclosure relate to methods of manufacturing compositions of the present disclosure. Some embodiments of the present disclosure relate to use of compositions of the present disclosure or methods of using the same to treat human or non-human animal subjects. Some embodiments of the present disclosure relate to treatment methods involving compositions of the present disclosure, including administration thereof to human or non-human animal subjects. Such uses and treatment methods can increase endogenous Klotho protein levels, such as by augmenting natural soluble alpha Klotho protein production and/or attenuating Klotho protein damage or degradation.

[0032] Certain embodiments include compositions of matter that comprise a health supplement that, when administered to human or non-human animal (e.g., mammalian) subjects, increases the levels of endogenous, soluble alpha-Klotho protein in the human or non-human animal subjects. The composition or health supplement formulation can comprise (synthetic) chemical and/or natural components or ingredients. In other words, components or ingredients of the composition or health supplement can be or originate from (synthetic) chemical and/or natural sources. An exemplary composition can be adapted (or chemical configured), or include a plurality of components adapted (or chemical configured), to raise serum soluble Klotho protein levels by increasing or enhancing endogenous production of soluble Klotho protein by the mammalian subject.

[0033] An exemplary composition can comprise one or more components, preferably selected from the group consisting of, for example, Vitamin D3, Vitamin E, Vitamin C, Vitamin K, 3,5,4′-trihydroxy-trans-stilbene (Resveratrol), Pterostilbene, N-acetylcysteine (NAC), Troglitazone, Rosiglitazone, Notopterygium incisum Ting, Gentian (Root; Extract), Cordyceps (Cordyceps Sinensis (CS) Mycelium), Isoflavones (Soy), Genistein, Daidzein, Quercetin (dihydrate; dill, bay leaf, oregano), Docosahexaenoic acid (DHA), Astaxanthin, Sesamin (Semen Sesamin Nigrum (Black)), Sesame (Seed Extract), Rosmarinic acid (RA; (Marjoram)), Tetradecylthioacetic Acid (TTA), Dicalcium Phosphate (Anhydrous), Mircrocrystalline cellulose (MCC), Croscarmellose Sodium (Primellose), Stearing Acid, Magnesium Stearate, Alpha Lipoic Acid, Conjugate (alpha) Linoleic Acid (CLA), Probiotics, Activated Charcoal, and others as known in the art.

[0034] An exemplary composition can comprise one or more components, preferably in suitable nutraceutical concentrations, and preferably selected from the group consisting of, for example, vitamin C, vitamin D3, vitamin E, N-acetylcysteine (NAC), quercetin (dihydrate), rosmarinic acid (RA), pterostilbene, docosahexaenoic acid (DHA), nicotinamide riboside (NR), nicotinamide adenine dinucleotide (NAD+), nicotinamide mononucleotide (NMN), and one or more probiotic. The one or more probiotic comprises an effective amount of the Bifidobacterium species and/or strains Bifidobacterium lactis BL-04, Bifidobacterium bifidum/lactis BB-02, and Bifidobacterium longum BL-05, and the Lactobacillus species and/or strains Lactobacillus acidophilus LA-14, Lactobacillus rhamnosus LR-32, and Lactobacillus paracasei LPC-37.

[0035] Certain ingredients or components can have positive benefits and very low side effects in treating or affecting one or more conditions that have been associated with cellular and tissue dysfunctions that occur with aging. Certain ingredients or components can (directly or indirectly) increase the circulating plasma level of soluble alpha Klotho (s-Klotho) levels in human or non-human animal subjects following administration thereof.

[0036] In at least one embodiment, a composition of the present disclosure can be or comprise a Dietary Supplement Health and Education Act of 1994 (DSHEA)-compliant nutritional supplement, which may be sold OTC, marketed and/or sold direct-to-consumer (DTC), and/or purchased without a prescription/physician order. In some embodiments, a composition of the present disclosure can be or comprise an approved Food and Drug Administration (FDA) pharmaceutical.

[0037] In some embodiments, ingredients can be co-administered, preferably via at least some co-formulation. In some embodiments, ingredients can be co-administered in separate formulations. For example, in some embodiments, ingredients can be co-administered in a multi-pill, -capsule, or dosage pack. Some ingredients can be provided in solid, granular, powdered, liquid, or other form.

[0038] Some embodiments can include one or more (additional) ingredients or components, as described herein. For instance, some embodiments can include one or more recombinant (e.g., human or mammalian) Klotho proteins, protein fragments, and/or protein variants, as described herein. Certain embodiments can include expression nucleic acid constructs and/or vectors, cell lines and/or cell suspension cultures, and methods of manufacturing, purifying, and administering the one or more recombinant (e.g., human or mammalian) Klotho proteins, protein fragments, and/or protein variants to (human or non-human animal) subjects. Some embodiments can include one or more active ingredients, such as a pharmaceutical or prescription medications (e.g., ARBs (e.g., Losartan, Valsartan), testosterone, Vit. D receptor agonists (e.g., calcitriol, paricalcitol), PPAR (gamma) agonists (e.g., thiazolidinediones, troglitazone, rosiglitazone), and/or others described in the patent references incorporated above).

[0039] Some embodiments can include a composition, comprising a pharmaceutically effective amount of one or more recombinant Klotho protein and an effective amount of a composition (e.g., health supplement) formulated to increase endogenous Klotho protein levels or production (e.g., in mammalian subjects). In some embodiments, the recombinant Klotho protein can be co-administered with the composition. In some embodiments, the recombinant Klotho protein can be combined with a pharmaceutically-acceptable carrier. In some embodiments, the administered recombinant Klotho protein can raise serum soluble Klotho protein levels by providing exogenous Klotho protein, while the composition can raise serum soluble Klotho protein levels by increasing or enhancing (natural) production of Klotho protein by the patient or subject.

[0040] Some embodiments can include a treatment method. The method can comprise administering to a subject in need thereof a (pharmaceutically) effective amount of a composition of the present disclosure. The composition can include (i) a pharmaceutically effective amount of one or more recombinant soluble Klotho protein or protein variant of the present disclosure and/or (ii) a pharmaceutically effective amount of a composition (e.g., health supplement) formulated to increase endogenous Klotho protein levels or production (e.g., in mammalian subjects).

[0041] Some embodiments can include a method of treating Klotho deficiency (e.g., in a human or non-human animal (e.g., mammalian) patient or subject). The method can comprise administering a composition to the mammalian subject, optionally or preferably after diagnosing the mammalian subject with Klotho deficiency. The composition can comprise, for example, one or more of: a pharmaceutical composition comprising a pharmaceutically-acceptable carrier or excipient and a pharmaceutically effective amount of a recombinant Klotho protein, recombinant Klotho protein fragment, or recombinant Klotho fusion protein disposed in the carrier or excipient; and a nutraceutical composition comprising a plurality of components adapted to raise serum soluble Klotho protein levels by increasing or enhancing endogenous production of soluble Klotho protein by the mammalian subject.

[0042] Some embodiments can include a method of treating an aging-related or other condition, disease, or disorder. Some embodiments can include a method of treating and/or preventing acute kidney injury (AKI), chronic kidney disease (CKD), or other condition. The subject to whom the composition is administered can be suffering from or at risk for a variety of conditions (e.g., disorders, diseases, injuries, illnesses, etc.). For example, some embodiments include a method of treating one or more chronic diseases and/or aging-related condition, such as a physical, mental, neurological, or other condition associated with (human) aging. Some embodiments can promote healing, recovery, longevity, and/or other beneficial outcome through one or more mechanisms or action. Administration of the inventive composition(s) can have a positive therapeutic effect on the course and outcome of the condition, including chronic and/or age-related disease and longevity in human subjects, and characterization of the same.

[0043] The pharmaceutically effective amount of the composition(s) can be sufficient to raise or increase the serum soluble Klotho protein concentration of the subject to a predetermined level, such as greater than, equal to, or between about 50 to 3000 picograms of soluble Klotho protein per milliliter of serum. The amount can also or alternatively be sufficient to maintain the serum soluble Klotho protein concentration of the subject at or above a predetermined threshold for a predetermined period of time. Embodiments can also include administering the composition(s) to a subject in need thereof so as to maintain the serum soluble Klotho protein concentration of the subject at or above a predetermined threshold for a predetermined period of time.

[0044] Embodiments can also include determining a serum soluble Klotho protein concentration of the subject. Embodiments can also include calculating a pharmaceutically effective amount of a composition of the present disclosure. Embodiments can also include determining a rate of soluble Klotho protein decline in the serum of the subject. Embodiments can also include calculating a subsequent dosage time at which the serum soluble Klotho protein concentration of the subject will be at or below a second predetermined level based on the determined rate. Embodiments can also include calculating a subsequent dosage time and/or amount of the composition sufficient to raise the serum soluble Klotho protein concentration of the subject from the second predetermined level to the first predetermined level. Embodiments can also include administering the subsequent dosage amount of the composition to the subject. Certain embodiments can include prescribing a regular (e.g., daily) dose or dosage form of the composition to the subject (e.g., based on determined levels of serum soluble Klotho protein concentration of the subject).

[0045] In certain embodiments, the composition (e.g., protein or supplement) or raised soluble Klotho protein levels can (be effective to) modulate the IGF-1 and/or Wnt signaling pathways, exhibit β-glucuronidase and/or sialidase activity, suppress the p53/p21 signaling pathway, and/or reduce H₂O₂-induced cell senescence and apoptosis, preferably through suppression of the p53/p21 signaling pathway. The protein or raised protein levels can function or be functional as a humoral factor, preferably exhibiting pleiotropic activity and/or preferably in the regulation of oxidative stress, growth factor signaling, ion homeostasis, and/or regulation of activity of glycoproteins on the cell surface, such as one or more ion channel proteins and/or growth factor receptors, such as Insulin/Insulin-Like Growth Factor-1 receptor.

[0046] In certain embodiments, the composition (e.g., protein or supplement) or raised soluble Klotho protein levels can (be effective to) treat one or more aging-related condition (or condition associated with (human) aging), such as frailty, bone density loss or bone mineral density loss, weight loss, muscular atrophy or degeneration, decline in muscle mass, decline in muscle strength, hand strength, leg strength, or physical fitness, decline in movement, freedom of movement, quality of life assessment, ejection fraction, or exercise capacity, decline in learning, learning capacity, memory, or intellectual quotient, cognitive deterioration or forgetfulness, decline in cognitive capacity or function, decline in synaptic plasticity or synaptic function, and cellular senescence.

[0047] In certain embodiments, the composition (e.g., protein or supplement) or raised soluble Klotho protein levels can (be effective to) treat one or more aging-related condition (or condition associated with (human) aging), such as Alzheimer's disease, Parkinson's disease, dementia or vascular dementia, amyotrophic lateral sclerosis (ALS) or motor neuron disease (MND), atrial fibrillation, chronic obstructive pulmonary disease (COPD), fibromyalgia, adult onset diabetes, arthritis or rheumatoid arthritis, osteoarthritis, osteoporosis, glaucoma, cataracts, macular degeneration and other eye diseases/disorders, multiple sclerosis (MS), lupus, and/or ulcerative colitis.

[0048] In certain embodiments, the composition (e.g., protein or supplement) or raised soluble Klotho protein levels can (be effective to) treat one or more other diseases or conditions. For instance, some embodiments of the present disclosure can be useful in one or more of treating cancer, lowering serum phosphate levels in a patient, treating diabetes or a diabetes-related condition (e.g., Type 1 diabetes mellitus, etc.) in a subject in need of such treatment, treating a heart condition (e.g., cardiovascular disease, left ventricular hypertrophy (LVH), pathological LVH and/or congestive heart failure, etc.) in a subject, treating acute lung injury in a subject (e.g., using nanoparticles), protecting the lung of a patient against oxidant injury, detecting early acute kidney injury in critically ill patients, attenuating vascular calcification in a subject, improving cognition, treating renal and/or liver ischemia, modulating stress response in (human) senescent endothelial cells, prophylactically and/or therapeutically treating, preventing, attenuating, arresting, and/or reversing acute and/or chronic kidney injury, disease, or disease progression and/or uremic cardiomyopathy, reversing or attenuating age-related therapy resistance in melanoma or other cancers, targeting apoptosis of senescent cells, preferably restoring tissue homeostasis thereby, and a variety of other indications.

[0049] Accordingly, embodiments can also include a composition for use in treating one or more aging-related or other conditions. An exemplary method of treating an aging-related or other condition, disease, or disorder, the method comprising administering to a subject in need thereof an effective amount of a composition of the present disclosure. The composition can include (i) a supplement, as described herein, and/or (ii) a recombinant soluble Klotho protein (e.g., having at least 80% amino acid sequence identity to at least a portion of one of SEQ ID NO: 2 through SEQ ID NO: 70 or SEQ ID NO: 107 through SEQ ID NO: 120 or SEQ ID NO: 125 through SEQ ID NO: 128 or SEQ ID NO: 133 or SEQ ID NO: 152). Optionally, the composition can include a pharmaceutically-acceptable carrier or excipient.

[0050] Some embodiments include a method of detecting and/or quantifying endogenous and/or exogenous Klotho protein, and more particularly endogenous and/or exogenous soluble alpha Klotho protein. Some embodiments include a method of diagnosing Klotho protein deficiency in a subject. Some embodiments include a product (e.g., a system or kit) for detecting and quantifying Klotho protein levels, and more particularly endogenous and/or exogenous soluble alpha Klotho protein levels. Some embodiments include methods of diagnosing Klotho protein deficiency in a subject. Some embodiments can include a method of treating Klotho deficiency in a subject.

[0051] Certain embodiments can include or utilize a blood or serum sample of the (mammalian) subject, preferably capillary blood and/or blood obtained from a finger-prick or other non-phlebotomic (non-venesectic) blood draw technique. It will be appreciated, however, that phlebotomic (venesectic) and other suitable blood draw techniques are also contemplated herein.

[0052] Some embodiments include a kit. Embodiments can include, for example, a sample collection container. The container can have an opening configured for receiving capillary blood. The capillary blood can contain, or be suspected of containing, an amount of soluble Klotho protein in some embodiments. Embodiments can include a sample preservative or anti-coagulant, preferably comprising one or more of EDTA and Heparin. The sample preservative or anti-coagulant can be disposed in a sample collection compartment of the container in some embodiments. The solution can be configured to stabilize soluble Klotho protein for at least 24 hours, and up to 7 days or more, at room temperature or without freezing. Embodiments can optionally include a capillary blood sampling device, preferably comprising a lancing device or lancet.

[0053] Some embodiments include a method. For example, some embodiments can include a method of stabilizing Klotho protein in a mammalian blood sample. Embodiments can include, for example, drawing or obtaining capillary blood from a mammalian subject and storing the capillary blood in a container for at least 24 hours at room temperature or without freezing. The container can have a preservative or anti-coagulant disposed therein, such that the preservative or anti-coagulant is mixed with the capillary blood in the container. The preservative or anti-coagulant can stabilize the soluble Klotho protein for at least 24 hours at room temperature or without freezing. The preservative or anti-coagulant can be or comprise one or more of heparin, lithium heparin, EDTA, and K₂ EDTA.

[0054] Embodiments can also include collecting the capillary blood in a container, and/or mixing the capillary blood with a preservative or anti-coagulant to form a mixture. In some embodiments, drawing capillary blood can include lancing skin of the mammal with a lancet. In some embodiments, the step of collecting the capillary blood in the container can include collecting at least or about 10-1000 ul, preferably about 50-200 ul of the capillary blood in the container Some embodiments can include storing the mixture or allowing the mixture to be stored for at least 3 days at room temperature or without freezing, the preservative or anti-coagulant stabilizing the soluble Klotho protein for the at least 3 days at room temperature or without freezing.

[0055] Some embodiments can optionally include assaying the mixture for the presence of the soluble Klotho protein. The step of assaying the mixture for the presence of the soluble Klotho protein can include detecting the soluble Klotho protein and/or quantifying the amount of soluble Klotho protein. Detecting the soluble Klotho protein and/or quantifying the amount of soluble Klotho protein can include contacting the mixture with an antibody configured to bind the soluble Klotho protein. Detecting the soluble Klotho protein and/or quantifying the amount of soluble Klotho protein can include performing ELISA on the mixture using an antibody configured to bind the soluble Klotho protein. Other detection methods may include mass spectrometry or Multi-Analyte Profiling (xMAP), such as Luminex technology (e g , miniaturized liquid array bioassay, small lasers, light emitting diodes (LEDs), digital signal processors, photo detectors, and/or charge-coupled device imaging), etc.

[0056] Some embodiments include a method of diagnosing Klotho deficiency in a mammalian subject or a method of treating Klotho deficiency in a mammalian subject. Embodiments can include, for example, providing or obtaining a fluid biological sample. The sample can include mammalian serum, preferably in the form of capillary blood. The method can optionally include mixing the mammalian serum with a preservative or anti-coagulant to form a mixture. The sample can also or alternatively include a mixture comprising mammalian serum, preferably in the form of capillary blood, and a preservative or anti-coagulant. The method can include assaying the mixture for the presence of soluble Klotho protein. The step of assaying the mixture for the presence of the soluble Klotho protein can include detecting the presence of the soluble Klotho protein, if any, in the mixture and/or quantifying the amount of the soluble Klotho protein, if any, in the mixture, optionally after storing the Klotho-stabilized mixture for a period of time at room temperature or without freezing. The method can include diagnosing the mammalian subject with Klotho deficiency when no soluble Klotho protein is detected in the mixture or when the amount of quantified soluble Klotho protein in the mixture is less than a predetermined amount. In some embodiments, diagnosing the mammalian subject with Klotho deficiency can include displaying the Klotho deficiency determination or diagnosis on a user interface of the computer system and/or producing a file or report, in physical or electronic form, that displays the Klotho deficiency determination or diagnosis.

[0057] In some embodiments, providing or obtaining a fluid biological sample can include drawing capillary blood from the mammalian subject and/or collecting capillary blood in a container. In some embodiments, the step of assaying the mixture for the presence of soluble Klotho protein can include performing ELISA on the mixture using an antibody configured to bind the soluble Klotho protein. Some embodiments can include administering a composition to the mammalian subject when no soluble Klotho protein is detected in the mixture or when the amount of quantified soluble Klotho protein in the mixture is less than a predetermined amount. Mass spectrometry can also or alternatively be performed.

[0058] The disclosed strategies, products, and/or health intervention methods specifically configured to increase circulating and/or endogenous levels of soluble Klotho may help to ameliorate the situation and problems associated with decreased Klotho levels in patients.

[0059] Some embodiments may include any of the features, options, and/or possibilities set out elsewhere in the present disclosure, including in other aspects or embodiments of the present disclosure. It is also noted that each of the foregoing, following, and/or other features described herein represent a distinct embodiment of the present disclosure. Moreover, combinations of any two or more of such features represent distinct embodiments of the present disclosure. Such features or embodiments can also be combined in any suitable combination and/or order without departing from the scope of this disclosure. Thus, each of the features described herein can be combinable with any one or more other features described herein in any suitable combination and/or order. Accordingly, the present disclosure is not limited to the specific combinations of exemplary embodiments described in detail herein.

[0060] Additional features and advantages of exemplary embodiments of the present disclosure will be set forth in the description that follows, and in part will be obvious from the description, or may be learned by the practice of such exemplary embodiments. The features and advantages of such embodiments may be realized and obtained by means of the instruments and combinations particularly pointed out in the appended claims. These and other features will become more fully apparent from the following description and appended claims, or may be learned by the practice of such exemplary embodiments as set forth hereinafter.

### BRIEF DESCRIPTION OF THE DRAWINGS

[0061] In order to describe the manner in which the above-recited and other advantages and features of the present disclosure can be obtained, a more particular description of the embodiments briefly described above will be rendered by reference to specific embodiments thereof which are illustrated in the appended drawings. For better understanding, the like elements have been designated by like reference numbers throughout the figure(s). Understanding that these drawings depict only typical embodiments of the disclosure and are not therefore to be considered to be limiting of its scope, the disclosure will be described and explained with additional specificity and detail through the use of the accompanying drawing(s) in which:

[0062] FIG. 1 depicts a schematic illustrating cellular production of various Klotho proteins according to an embodiment of the present disclosure;

[0063] FIG. 2 (A-D) depicts: A) schematic structures of isoform 1 and isoform 2 of human α-Klotho, and the location of the epitope for the antibody binding used in generating C-D (residues 800 to 900); B) The full-length α-Klotho protein sequence of 1012 amino acids, with KL1 and KL2 shown in red and green, respectively, and TM highlighted (black); C) and D) Western blot analysis of human cell lysates (C) and human tissues (D);

[0064] FIG. 3 illustrates stability of Klotho protein in human serum at various temperatures over a time.

[0065] FIG. 4 is a 20% SDS-PAGE of Klotho proteins.

[0066] FIG. 5A is a dose-response curve for 6xHis tagged Klotho.

[0067] FIG. 5B is a dose-response curve for Fc-tagged Klotho.

[0068] FIG. 6 is a dose-response curve comparing Klotho and Klotho-Fc.

[0069] FIGS. 7A-7B SDS-PAGE (reducing and non-reducing) illustrating purity and integrity of purified antibody.

[0070] FIGS. 8A-8B illustrate raw absorbance data at 450 nm and corresponding antibody titration curve.

[0071] FIGS. 9A and 9B illustrate ELISA assay results for HRP and Biotin-anti-Klotho IgY.

[0072] FIG. 10 is a graphical representation of the (daily) change in circulating Klotho protein levels in a human subject.

[0073] FIGS. 11A-11B illustrate results of quantitative ELISA.

[0074] FIG. 12 illustrates Klotho level at different incubation time at RT for donors A-D and donor A, spiked.

[0075] FIG. 13 illustrates an example report graph or chart.

[0076] FIG. 14 illustrates a chromatograph of Klotho-Fc protein.

[0077] FIG. 15A illustrates stable pool 291645 expressing the FL-ECD (34-981)-Fc Klotho derivative (SEQ ID NO: 52)

[0078] FIG. 15B illustrates Klotho protein under native and non-reducing conditions.

[0079] FIGS. 16A-16B illustrate Western blots of Klotho protein FL-ECD (34-981)-TEV-Twin-Strep expressed by stable pool 291647 (SEQ ID NO: 66) under native and non-reducing conditions.

[0080] FIG. 17 is a gel of the various indicated recombinant Klotho protein constructs.

[0081] FIG. 18 is a series of gels for the respective indicated recombinant Klotho protein constructs.

[0082] FIGS. 19-26 illustrate density, viability and production of various cell lines.

[0083] FIG. 27 illustrates copy number stability in various cell line clones.

[0084] FIGS. 28-32 illustrate stability of various cell line clones.

[0085] FIG. 33 illustrates an ELISA gel for purified Klotho proteins.

[0086] FIGS. 34A-34C illustrate Klotho protein concentration measured and spike recovery observed in the respective samples.

[0087] FIGS. 35A-35B illustrate preliminary global glycan analysis.

[0088] FIGS. 36A-36C illustrate growth, viability, and titer curves, respectively, for various cell lines.

[0089] FIGS. 37A-37C illustrate growth, viability, and titer curves, respectively, for isolated cell lines.

[0090] FIGS. 38A-38C illustrate growth, viability, and titer curves, respectively, for a chosen cell line.

[0091] FIGS. 39A-39B illustrate Western blot analysis was performed on expressed protein pools.

[0092] FIG. 40A illustrates Protein A Sepharose 4 Fast Flow purification of Klotho proteins.

[0093] FIG. 40B illustrates Superdex 200 purification of Klotho proteins

[0094] FIGS. 41A and 41B illustrate Superdex 200 fractionation for klotho-Fc protein.

[0095] FIG. 42 illustrates results of a protein binding bioassay for various Klotho proteins.

[0096] FIGS. 43A-43E illustrate proliferation of stimulated cell in a dose-dependent manner.

[0097] FIG. 44 illustrates, graphically, the average (mean) body weight (+/−standard error of the mean; SEM bars) of rats in each group over the course of the 12-day study.

### DETAILED DESCRIPTION

[0098] Embodiments of the present disclosure relate to compositions and methods for increasing serum soluble Klotho protein levels in a human or non-human animal (or mammal) subject and to compositions and methods for monitoring, detecting, and/or quantifying Klotho protein level(s), particularly endogenous and/or exogenous soluble alpha Klotho protein level(s), and/or for diagnosing and/or treating Klotho protein deficiency in the subject. Some embodiments include one or more compositions, comprising (i) recombinant human Klotho proteins, protein fragments, and/or protein variants, expression nucleic acid constructs and/or vectors, cell lines and/or cell suspension cultures, and/or (ii) products (e.g., supplements) that, when administered to the subject, cause an increase Klotho protein level(s), expression, or production, particularly endogenous soluble alpha Klotho protein level(s), expression, or production, in the subject. Certain embodiments include methods of manufacturing, purifying, and administering the compositions of the present disclosure to the (human or non-human animal) subjects and/or methods for increasing Klotho protein level(s), expression, or production, particularly (exogenous and/or endogenous) soluble alpha Klotho protein level(s), expression, or production, in the subject. Some embodiments include methods for monitoring, detecting, and/or quantifying Klotho protein level(s), particularly (endogenous and/or exogenous) soluble alpha Klotho protein level(s), and/or for diagnosing Klotho protein deficiency in the subject.

[0099] Before describing various embodiments of the present disclosure in detail, it is to be understood that this disclosure is not limited only to the specific parameters, verbiage, and description of the particularly exemplified systems, methods, and/or products that may vary from one embodiment to the next. Thus, while certain embodiments of the present disclosure will be described in detail, with reference to specific features (e.g., configurations, parameters, properties, steps, components, ingredients, members, elements, parts, and/or portions, etc.), the descriptions are illustrative and are not to be construed as limiting the scope of the present disclosure and/or the claimed invention. In addition, the terminology used herein is for the purpose of describing the embodiments, and is not necessarily intended to limit the scope of the present disclosure and/or the claimed invention.

[0100] While the detailed description is separated into sections, the section headers and contents within each section are for organizational purposes only and are not intended to be self-contained descriptions and embodiments or to limit the scope of the description or the claims. Rather, the contents of each section within the detailed description are intended to be read and understood as a collective whole, where elements of one section may pertain to and/or inform other sections. Accordingly, embodiments specifically disclosed within one section may also relate to and/or serve as additional and/or alternative embodiments in another section having the same and/or similar products, methods, and/or terminology.

[0101] To facilitate understanding, like references (i.e., like naming of components and/or elements) have been used, where possible, to designate like elements common to different embodiments of the present disclosure. Similarly, like components, or components with like functions, will be provided with similar reference designations, where possible. Specific language will be used herein to describe the exemplary embodiments. Nevertheless it will be understood that no limitation of the scope of the disclosure is thereby intended. Rather, it is to be understood that the language used to describe the exemplary embodiments is illustrative only and is not to be construed as limiting the scope of the disclosure (unless such language is expressly described herein as essential).

[0102] For the sake of brevity, the present disclosure may recite a list or range of numerical values. It will be appreciated, however, that where such a list or range of numerical values (e.g., greater than, less than, up to, at least, and/or about a certain value, and/or between two recited values) is disclosed or recited, any specific value or range of values falling within the disclosed values or list or range of values is likewise specifically disclosed and contemplated herein. By way of illustrative example, disclosure of “up to 1,000 mg” of a particular ingredient or component includes a specific disclosure of: (i) any value greater than zero and less than or equal to 1,000 milligrams, including but not limited to 0.01 mg, 1 mg, 5 mg, 10 mg, 50 mg, 100 mg, 500 mg, 750 mg, 990 mg, and 1,000 mg; and/or (ii) any range of values from or between greater than zero and less than or equal to 1,000 milligrams, including but not limited to 0.01-1,000 mg, 1 mg −990 mg, 5 mg −750 mg, 10 mg −500 mg, and 50 mg −100 mg. Similarly, disclosure of “at least 80% amino acid sequence identity” or “80%-100% amino acid sequence identity” includes a specific disclosure of: (i) any whole percentage value between 80% and 100%, including 81%, 82%, 83%, 84%, 85%, 86%, 87%, 88%, 89%, 90%, 91%, 92%, 93%, 94%, 95%, 96%, 97%, 98%, 99%, and 100%, as well as any fraction of a percent value therebetween; and/or (ii) any range of percentage values between 80% and 100%, including, by way of non-limiting example, 81%-100%, 82%-100%, 83%-100%, 84%-100%, 85%-100%, 86%-100%, 87%-100%, 88%-100%, 89%-100%, 90%-100%, 91%-100%, 92%-100%, 93%-100%, 94%-100%, 95%-100%, 96%-100%, 97%-100%, 98%-100%, and 99%-100%.

### Abbreviated List of Defined Terms

[0103] To assist in understanding the scope and content of the foregoing and forthcoming written description and appended claims, a select few terms are defined directly below.

[0104] Unless defined otherwise, all technical and scientific terms used herein have the same meaning as commonly understood by one of ordinary skill in the art to which the present disclosure pertains.

[0105] Various aspects of the present disclosure, including systems, methods, and/or products may be illustrated with reference to one or more embodiments, which are exemplary in nature. As used herein, the terms “embodiment” mean “serving as an example, instance, or illustration,” and should not necessarily be construed as preferred or advantageous over other aspects disclosed herein. In addition, reference to an “ embodiment” of the present disclosure or invention is intended to provide an illustrative example without limiting the scope of the invention, which is indicated by the appended claims.

[0106] As used in this specification and the appended claims, the singular forms “a,” “an” and “the” each contemplate, include, and specifically disclose both the singular and plural referents, unless the context clearly dictates otherwise. For example, reference to a “protein” contemplates and specifically discloses one, as well as a plurality of (e.g., two or more, three or more, etc.) proteins. Similarly, use of a plural referent does not necessarily require a plurality of such referents, but contemplates, includes, specifically discloses, and/or provides support for a single, as well as a plurality of such referents, unless the context clearly dictates otherwise.

[0107] As used throughout this disclosure, the words “can” and “may” are used in a permissive sense (i.e., meaning having the potential to), rather than the mandatory sense (i.e., meaning must). Additionally, the terms “including,” “having,” “involving,” “containing,” “characterized by,” variants thereof (e.g., “includes,” “has,” and “involves,” “contains,” etc.), and similar terms as used herein, including the claims, shall be inclusive and/or open-ended, shall have the same meaning as the word “comprising” and variants thereof (e.g., “comprise” and “comprises”), and do not exclude additional, un-recited elements or method steps, illustratively.

[0108] Except in the examples, or where otherwise expressly indicated, all numerical quantities in this description indicating amounts of material or conditions of reaction and/or use are to be understood as modified by the word “about”. As used herein, the term “about,” with regard to a value, means +/−10% of the stated value or amount represented thereby. For instance, throughout the present disclosure, the term “about” is used in connection with a percent concentration or composition of a component or ingredient (e.g., in a mixture, such as a fluid or liquid mixture, aqueous mixture, solution, etc., optionally or preferably measured as a w/w percent, w/v percent, v/v percent, etc.). In such instance, the term “about” and/or the term “+/−10%” implies and/or includes +/−10% of the stated numeric value, as opposed to +/−10 percentage points of the recited percent. By way of example, where 20% w/w of a component or ingredient reflects 20 g of the component or ingredient per 100 mL of total mixture, the term “about” and/or the term “+/−10%” implies and/or includes a recited range from 18 g to 22 g (i.e., from 18% w/w to 22% w/w), not a range of 10% w/w to 30% w/w. Alternatives for so-called “about” values and/or +/−10% include +/−1%, +/−2%, +/−3%, +/−4%, +/−5%, +/−6%, +/−7%, +/−8%, or +/−9% of the stated value, each of which is contemplated as a suitable alternative to or substitute for the term “about” or the use of +/−10% herein.

[0109] As used herein, the terms “approximately” and “substantially” represent or imply an (or any) amount close to the stated amount (e.g., that still performs a desired function or achieves a (desired or expected) result). For example, the terms “approximately” and “substantially” may refer to an amount that is within, or less than, 10%, 5%, 1%, 0.1%, 0.01%, or other percent of a stated amount. As used herein, the term “substantially devoid” means (1) an undetectable or unquantifiable amount, (2) less than or below an amount generally considered by those skilled in the art to reflect a detectable or quantifiable amount, and/or (3) less than or below an amount generally considered by those skilled in the art to be functional or able to achieve a (desired or expected) result (e.g., less than 10%, 5%, 1%, 0.1%, 0.01%, or other percent).

[0110] By “Quantum satis” (also referred to as “q.s.” or “qs”) is meant the amount that is enough. Accordingly, a component or ingredient “qs 100%,” “provided at qs 100%,” or “qs to 100%” indicates that the component or ingredient is provided or included in an amount sufficient to complete the composition or to bring the total (of all components, whether recited or not) to 100%. It is noted, however, that a (final) component or ingredient “qs 100%,” “provided at qs 100%,” or “qs to 100%” does not indicate that the mixture consists of, consists essentially of, or only contains the components listed or recited immediately before the “qs 100%” component. In other words, “qs 100%,” and similar terms, is meant to be an open-ended expression indicating the source of the remainder, whatever that remainder may be.

[0111] As used herein, the term “product(s)” includes compositions, formulations, and mixtures, as well as devices, apparatus, assemblies, kits, systems, and so forth. Similarly, the term “method” includes processes, procedures, steps, and so forth.

[0112] As used herein, a “feature” or “aspect” of the present disclosure or embodiment disclosed herein refers to a property, attribute, component, ingredient, element, member, part, portion, (method) step, or other facet of the subject matter at hand.

[0113] The word “or” as used herein generally means any one member of a particular list, but also includes any combination of two or more members of said list. Similarly, the term “and” can be interchangeable with the terms “or,” either of which can be understood to mean “and/or”.

[0114] The term “comprising” is synonymous with “including,” “having,” “containing,” or “characterized by.” These terms are inclusive and open-ended and do not exclude additional, unrecited elements or method steps.

[0115] The phrase “consisting of” excludes any element, step, or ingredient not specified in the claim. When this phrase appears in a clause of the body of a claim, rather than immediately following the preamble, it limits only the element set forth in that clause; other elements are not excluded from the claim as a whole.

[0116] The phrase “consisting essentially of” limits the scope of a claim to the specified materials or steps, plus those that do not materially affect the basic and novel characteristic(s) of the claimed subject matter.

[0117] The terms “comprising”, “consisting of”, and “consisting essentially of” can be alternatively used. When one of these three terms is used, the presently disclosed and claimed subject matter can include the use of either of the other two terms.

[0118] The terms “plurality” and “at least two” are used interchangeably.

[0119] The term “condition” refers to any disorder, disease, injury, or illness, as understood by those skilled in the art, that is manifested or anticipated in a patient. Manifestation of such a condition can be an early, middle, or late stage manifestation, as known in the art, including pre-condition symptoms, signs, or markers. Anticipation of such a condition can be or include the predicted, expected, envisioned, presumed, supposed, and/or speculated occurrence of the same, whether founded in scientific or medical evidence, risk assessment, or mere apprehension or trepidation.

[0120] The term “patient,” as used herein, is synonymous with the term “subject” and generally refers to any animal under the care of a medical professional, as that term is defined herein, with particular reference to (i) humans (under the care of a doctor, nurse, or medical assistant or volunteer) and (ii) non-human animals, such as non-human mammals (under the care of a veterinarian or other veterinary professional, assistant, or volunteer).

[0121] The terms “medical professional” as used herein, generally refers to any individual or entity that is responsible for or participates in providing health care to an animal, including human and non-human animals, such as non-human mammals, with particular emphasis on licensed health care providers or unlicensed providers, such as assistants, technicians, and/or volunteers, particularly those covered under the (blanket) license or insurance of a health care provider. This term may, when contextually appropriate, include an oncologist, a surgeon, a physician's assistant, a nurse, a phlebotomist, a veterinarian, etc.

[0122] The term “cancer” refers to an abnormal, typically uncontrolled, growth of cells. A “cancerous cell” as used herein comprises a malignant cell having an abnormal, typically uncontrolled, growth. As such, the term cancer is an umbrella term encompassing a plurality of different distinctive diseases characterized by malignant cells growing in a typically uncontrolled manner.

[0123] The term “diagnosis,” or diagnosing,” and similar terms, as used herein, is not intended to convey or require (in all cases) a certified, regulatory-compliant, medical diagnosis, as required or regulated by the U.S. Food and Drug Administration (FDA) or any other government or non-government entity, organization, or agency. Rather, “diagnosis,” or diagnosing,” and similar terms, as used herein, relates to providing information that may be indicative of a condition and/or helpful in making a determination related to the condition.

[0124] The term “co-administration” and similar terms refer to concurrent, sequential, and/or combined administration of two or more components. For instance, two components can be co-administered by administering each component in a separate dosage concurrently, simultaneously, or sequentially (e.g., distinct administrations separated by a period of time). The period of time can be very small (e.g., substantially, immediately following a first administration) or longer (e.g., 1-60 seconds, 1-60 minutes, 1-24 hours, 1-7 days, 1-4 weeks, 1-12 months, and so forth, or any value or range of values therebetween). Concurrent or simultaneous administration can include overlapping administration timeframes for the two or more components or administration of a combination product comprising a mixture of the two or more components.

[0125] As used herein, “room temperature” may refer to any temperature above freezing (0° C., or other (equivalent) freezing temperature, depending on the presence of freezing point adjusting components) and below normal human body temperature (37° C., or other (equivalent) boiling temperature, depending on the presence of boiling point adjusting components), preferably above about 4° C. and below about 35° C., more preferably between about 5° C. and about 32° C., between about 8° C. and about 30° C., between about 10° C. and about 30° C., between about 10° C. and about 25° C., between about 10° C. and about 20° C., between about 10° C. and about 15° C., between about 15° C. and about 30° C., between about 15° C. and about 25° C., between about 15° C. and about 20° C., between about 20° C. and about 30° C., between about 20° C. and about 25° C., between about 20° C. and about 22° C., or any value or range of values therebetween.

[0126] As used herein, “refrigeration” may refer to any temperature above freezing (0° C.) and below about 32° C., preferably between about 1° C. and about 30° C., between about 1° C. and about 25° C., between about 1° C. and about 20° C., between about 1° C. and about 15° C., between about 2° C. and about 20° C., between about 2° C. and about 15° C., between about 3° C. and about 20° C., between about 3° C. and about 15° C., between about 4° C. and about 20° C., between about 4° C. and about 15° C., or any value or range of values therebetween.

[0127] As used herein, “nucleic acid,” and similar terms, refer to a naturally occurring or synthetic oligonucleotide or polynucleotide, whether DNA or RNA or DNA-RNA hybrid, single-stranded or double-stranded, sense or antisense. In particular, nucleic acids can include, without limitation, DNA, RNA, cDNA, gDNA, ssDNA, dsDNA or any combination thereof. Nucleic acids of the disclosure can also include nucleotide or nucleic acid analogs (e.g., BrdU), and non-phosphodiester (internucleoside) linkages or backbones (e.g., peptide nucleic acid (PNA) or thiodiester linkages), known in the art.

[0128] The terms “peptide” or “protein” as used herein refers to any peptide, oligopeptide, polypeptide, gene product, expression product, or protein. A peptide is comprised of consecutive amino acids. The terms “peptide” or “protein” encompass naturally occurring or synthetic molecules.

[0129] As used herein, the term “standard amino acid” includes: alanine—ala—A; arginine—arg13 R; asparagine—asn—N; aspartic acid—asp—D; cysteine—cys—C; glutamine—gln—Q; glutamic acid—glu—E; glycine—gly—G; histidine—his—H; isoleucine—ile—I; leucine—leu—L; lysine—lys—K; methionine—met—M; phenylalanine—phe—F; proline—pro—P; serine—ser—S; threonine—thr—T; tryptophan—trp—W; tyrosine—tyr—Y; and valine—val—V.

[0130] As used herein, “codon optimized” or “codon optimization” refers to the process of modifying or changing codons in a nucleotide sequence to codons that are preferred or more closely match the pattern of codon usage in the organism used for expression of the molecule. Thus, codons can be optimized for usage in a particular organism in which expression is desired based on known codon usage in the organism in order to enhance the effectiveness of expression of the nucleic acid, e.g., to achieve faster translation rates and high accuracy. The codon usage in a particular organism is known.

[0131] The encoding nucleic acid molecule can be a modified wild-type or a codon optimized sequence, where the codons are optimized for expression in a particular host cell, such as mammalian cells, e.g. , CHO cells or 293 cells, or in a yeast, or a plant cell, eukaryotic cells.

[0132] In particular examples, the nucleic acid sequence can be codon optimized, for example, to increase expression levels of the encoded sequence. The particular codon usage is dependent on the host organism in which the modified polypeptide is expressed. One of skill in the art is familiar with optimal codons for expression in mammalian or human cells, bacteria or yeast, including for example E. coli or Saccharomyces cerevisiae. For example, codon usage information is available from the Codon Usage Database available at kazusa.or.jp.codon (see e.g., Richmond (2000) Genome Biology, 1:241 for a description of the database. See also, Forsburg (2004) Yeast, 10:1045-1047; Brown et al. (1991) Nucleic Acids Research, 19:4298; Sharp et al. (1988) Nucleic Acids Res., 12:8207-8211; Sharp et al. (1991) Yeast, 657-78).

[0133] The first definition of an acronym or other abbreviation applies to all subsequent uses herein of the same abbreviation and applies mutatis mutandis to normal grammatical variations of the initially defined abbreviation; and, unless expressly stated to the contrary, measurement of a property is determined by the same technique as previously or later referenced for the same property.

### Illustrative Embodiments

[0134] Illustrative embodiments of the present disclosure include, but are not limited to, compositions, compositions of matter, products, articles of manufacture, formulations, combination products, co-administrations, co-formulations, dosages, process, methods, treatment protocols, diagnostic methods, kits, and so forth.

### Products and Methods for Stabilizing Klotho Protein in Blood

[0135] The stability of Klotho proteins (e.g., soluble Klotho) in blood or serum, especially at room temperature, and more especially for (extended) periods of time, has not been reported previously. FIG. 3 illustrates the surprising and unexpected stability of Klotho protein in human serum at room temperature, as well as other temperatures, over extended periods of time.

[0136] Without being bound to any theory, typical blood or serum protein diagnostics require a venous blood draw to collect a suitable amount of blood for monitoring, detecting, and/or quantifying protein (levels). Moreover, the drawn blood samples are typically processed soon after sampling (e.g., same day, within minutes or hours of sampling, etc.) or refrigerated (below room temperature) to preserve protein and/or sample stability. The Inventors have found, however, that Klotho protein in blood can be stable for up to 7 days, 9 days, 14 days, or more, at room temperature, in some embodiments of the present disclosure. In some embodiments, for instance, adding EDTA and/or Heparin to the sample can stabilize Klotho protein for at least 3 days, 4 days, 5 days, 6 days, 7 days, 8 days, 9 days, 10 days, 11 days, 12 days, 13 days, 14 days, 15 days, 16 days, 17 days, 18 day, 19 days, 20 days, 21 days, 22 days, 23 days, 24 days, 25 days, 26 days, 27 days, 28 days, 29 days, or 30 days at room temperature (data not shown). By way of non-limiting example, levels of Klotho in blood samples collected from four donors were relatively constant over a 7-day period (and over a 14-day period), at room temperature, with added EDTA and/or Heparin (see FIG. 3). Additionally, both tested anticoagulants, EDTA and Heparin, showed no significant difference in terms of Klotho concentration. This was surprising and unexpected to the inventors.

[0137] Room temperature storage may be important for commercial diagnostic applications, in which refrigeration of hundreds, thousands, tens of thousands, etc., of samples may not be commercially practical (logistically and/or monetarily). With a suitable room temperature stabilizing method, as described here, commercial diagnostic testing of Klotho blood or serum levels can be accomplished.

[0138] In light of the foregoing, an embodiment of the present disclosure can include a method and/or product that combines EDTA and/or Heparin to a biological sample (e.g., blood or serum) that contains Klotho protein. Some illustrative products can include a sample collection kit comprising a sample collection container and a sample preservation composition.

[0139] Some embodiments include a method of stabilizing Klotho protein in a mammalian blood sample. The method can include obtaining capillary blood from a mammalian subject. The capillary blood can contain (or be suspected of containing) an amount of soluble Klotho protein. The method can include storing the capillary blood (e.g., in a container) for at least 24 hours (or, preferably, at least 2, 3, 4, 5, 6, 7, 8, 9, 10, 11, 12, 13, 14, 18, 21, 28, or 30 days, or more), preferably at room temperature. The capillary blood sample can be mixed with a preservative or anti-coagulant. For example, the container can have a preservative or anti-coagulant disposed therein or added thereto, such that the preservative or anti-coagulant is mixed with the capillary blood in the container. The preservative or anti-coagulant can be or comprise one or more of heparin, lithium heparin, EDTA, and K₂ EDTA. The preservative or anti-coagulant can stabilize the soluble Klotho protein for the at least 24 hours (or longer), preferably at room temperature. It will be appreciated, however, that refrigeration and/or freezing are also contemplated herein.

[0140] In addition, the Inventors have found that measured Klotho protein levels from finger stick (about 10-1000 ul, preferably about 50-200 ul of blood) are consistent with Klotho protein levels measured from venous blood draw in the same subject. Thus, Klotho protein can be accurately, reproducibly, and reliably measured in relatively small, commercially practical volumes of blood. This was surprising and unexpected to the inventors. In particular, the Inventors had expected that the quantity of blood collected in a standard vial may be required in order to accurately, reproducibly, and reliably measure Klotho protein in blood.

[0141] Without being bound to any theory, venous blood draws (e.g., for FDA-approved or other diagnostics) typically require a professional phlebotomist. Venous blood draws are also inconvenient and painful to the patient. A finger stick method, on the other hand, is convenient and low cost. Commercially, direct-to-consumer applications (e.g., diagnostic kits) may require at-home blood sampling. In such cases, a venous blood draw may be undesirable and/or impractical. Embodiments of the present disclosure can permit capillary blood sampling with a simple and convenient finger prick (or other means of sampling capillary blood). The amount of capillary blood sampled can be, for example, between about 10-1000 ul, preferably about 20-800 ul, more preferably about 30-600 ul, still more preferably about 40-400 ul, still more preferably about 50-200 ul of capillary blood.

[0142] In light of the foregoing, some embodiments of the present disclosure can include products and methods for capillary (non-venous, non-phlebotomic, etc.) sampling of blood or serum. Some embodiments can include a capillary blood sampling device. Illustratively, the capillary blood sampling device can be or comprise a lancing device and/or comprise a (blood) lancet). In some embodiments, the blood sampling or lancing device can be or comprise a finger stick apparatus, such as a (spring-loaded) finger pricker. It will be appreciated, however, that the present disclosure is not limited to fingers and quick-prick devices. In some embodiments, the lancing device or lancet thereof can be disposable and/or replaceable. Embodiments can also include written instructions for using the kit to collect a blood sample.

[0143] An illustrative method of stabilizing Klotho protein in a mammalian blood sample can comprise obtaining capillary blood from a mammalian subject, the capillary blood containing an amount of soluble Klotho protein, and storing the capillary blood in a container for at least 24 hours at room temperature, the container having a preservative or anti-coagulant disposed therein, the preservative or anti-coagulant being mixed with the capillary blood in the container, the preservative or anti-coagulant stabilizing the soluble Klotho protein for at least 24 hours at room temperature, the preservative or anti-coagulant comprising one or more of heparin, lithium heparin, EDTA, and K₂ EDTA. In some embodiments, storing the capillary blood mixed with the preservative or anti-coagulant for at least 2, 3, 4, 5, 6, 7, 8, 9, 10, 11, 12, 13, 14, 18, 21, 28, or 30 days at room temperature, the preservative or anti-coagulant stabilizing the soluble Klotho protein for at least 2, 3, 4, 5, 6, 7, 8, 9, 10, 11, 12, 13, 14, 18, 21, 28, or 30 days at room temperature. The sample of mixture may also be refrigerated in certain embodiments.

[0144] In certain embodiments, a small amount of blood (1-4 drops, about 10-1000 ul, preferably about 50-200 ul can be collected (e.g., at home) and sent via unfrozen, unrefrigerated, or uncooled (e.g., ambient or room temperature), normal shipping methods to a diagnostic facility. This provides a substantial benefit over existing methods and products. Accordingly, personal, at-home, or other non-clinic-based testing or diagnostics (e.g., lateral flow with quantification/measurement indicator, home ELISA kits, etc.) are contemplated herein. It will also be appreciated, however, that clinical or clinic-based testing or diagnostics are contemplated herein.

### Products and Methods for Measuring Klotho Protein Levels

[0145] Some embodiments include a method of detecting and/or quantifying endogenous and/or exogenous Klotho protein, and more particularly endogenous and/or exogenous soluble alpha Klotho protein. Some embodiments include a method of diagnosing Klotho protein deficiency in a subject. Some embodiments include a product (e.g., a system or kit) for detecting and quantifying Klotho protein levels, and more particularly endogenous and/or exogenous soluble alpha Klotho protein levels. Some embodiments include methods of diagnosing Klotho protein deficiency in a subject.

[0146] It has been postulated that levels of circulating, soluble Klotho protein in the serum of mammals decrease with increasing age. Prior to the present disclosure, however, reliable, reproducible data as to what age this postulated decrease in serum Klotho levels may begin to take place, what the normal level (or range) of naturally-occurring, circulating soluble Klotho protein is in human and non-human animals, what the rate of decline in circulating Klotho is in human and non-human animals, and how low the level (or range) of naturally-occurring, circulating soluble Klotho protein gets in human and non-human animals, was not available or widely accepted. Commercially-available antibodies may not be suitable for reliable, reproducible, and/or cost-effective detection of (both endogenous and exogenous) Klotho protein in a (crude and/or substantially unpurified) mammalian blood or serum sample. Accordingly, suitable antibodies (e.g., for blood sample ELISA detection) were developed in accordance with the following procedure.

[0147] Phase-1: Klotho Protein Expression: (mouse and human) alpha Klotho proteins of various sizes (e.g., amino acid residues 34-981, 34-549, etc. for human) with a (C-terminal) 6xHis tag, (C-terminal) Fc tag, or (N- or C-terminal) HAS tag were manufactured. Gene constructs corresponding to the above proteins were synthesized and cloned into a commercially-available expression vector, which were then transfected into HEK-293 cells or CHO cells for Klotho protein production. Expressed Klotho protein was purified by methods, known and described in the present disclosure. Illustratively, IMAC and IE protein chromatography were used, yielding 0.78 mg/mL protein sample (measured by UV absorbance at 280 nm) in 330 mM NaCl, 20 mM Na-Phosphate buffer, pH 8.0. Similarly,

[0148] Protein A chromatography followed by size exclusion chromatography, as described herein, yielded active protein in monomeric and multimeric (e.g., dimer and tetramer) form.

[0149] Quality control: protein purity and integrity of purified protein was analyzed in 4-20% SDS -PAGE (reducing and non-reducing) stained with GelCode Blue reagent. See e.g., FIG. 4, in which:

[0150] Lane 1: Klotho ECD, Lot# 170918A, 2 ug/lane, reduced.

[0151] Lane M: Protein molecular weight marker.

[0152] Lane 2: Klotho ECD, Lot# 170918A, 2 ug/lane, non-reduced.

[0153] Lane 3: BSA standard, 2 ug/lane, reduced

[0154] The theoretical, calculated molecular weight of the expressed protein was 109.97 kDa.

[0155] Phase-2: Chicken Polyclonal (IgY) and Mouse Monoclonal (hybridoma) development: Expressed protein was used as an antigen to immunize mice and chickens for development of mono- and polyclonal antibodies. Mouse monoclonal is preferred in some embodiments for ELISA antibodies. After the fusion process (splenocytes with myeloma cells), two rounds of hybridoma selection were performed, around 3,000 clones were initially screened and finally narrowed to 10 clones, based on activity. These 10 clones were banked and also cultured and purified to produce ˜5 mg of purified antibody from each.

[0156] The tables below present illustrative mouse sera IgG titer evaluations using target antigens, by indirect ELISA (Standard ELISA protocol. TMB 5 mM)

[0157] Antigen 1—6xHis tagged Klotho 0.5 ug/mL in 50 mM Na-bicarbonate buffer.

[0158] Antigen 2—Klotho-Fc 0.5 ug/mL in 50 mM Na-bicarbonate buffer.

[0159] Summary of Table 1: Mice M3 and M5 were selected for spleen collection.

[0160] Primary screening of Klotho hybridoma: Splenocytes from mice #M3 and #M5 collected and fused with myeloma cells according to standard protocol.

[0161] Hybridoma supernatants were evaluated by indirect ELISA using target antigens (standard indirect ELISA protocol. TMB 10 mM.).

[0162] Antigen, Klotho protein (Lot#170918A, 0.78 mg/mL) 0.5 ug/mL in 50 mM Na-Bicarbonate, 100 ul/well, +4° C., overnight.

[0163] Anti-mouse HRP, Peroxidase AffiniPure Goat Anti-Mouse IgG (subclasses 1+2a+2b+3), Fcγ Fragment Specific, 1:4000 (Jackson Lab., Cat#115-035-164) in SEDB, 100 uL/well, 1 hour, RT.

[0164] Selection cut-off OD450 nm>0.5.

[0165] The tables below present primary Klotho hybridoma screening. Clones with OD450 nm between 0.5 and <2 are highlighted in yellow (light grey). Clones with OD450 nm>2 are highlighted in orange (dark grey).

[0166] Summary of Table 2: 2,976 clones isolated and analyzed. 66 target specific clones expanded for confirmatory screening.

[0167] Secondary screening of Klotho hybridoma: Hybridoma supernatants were evaluated by indirect ELISA using target antigens (standard indirect ELISA protocol. TMB 10 min.).

[0168] Antigens, (1) Klotho-6xHis protein (Lot#170918A, 0.78 mg/mL) 0.5 ug/mL in 50 mM Na-Bicarbonate, 100 ul/well, +4° C., overnight. (2) Klotho-Fc protein (Vista, 0.1 mg/mL) 0.5 ug/mL in 50 mM Na-Bicarbonate, 100 ul/well, +4° C., overnight.

[0169] Detection Ab: Anti-mouse HRP, Peroxidase AffiniPure Goat Anti-Mouse IgG (subclasses 1+2a+26+3), Fcy Fragment Specific, 1:5000 (Jackson Lab., Cat#115-035-164) in SEDB, 100 uL/well, 1 hour, RT.

[0170] Summary of Table 3: 28 Klotho-6xHis specific clones were confirmed (OD450 cut-off: >0.5, Klotho-6xHis plate)—1F6, 2E1, 2E12, 3D2, 4H4, 4H5, 5D12, 7A12, 7F9, 8G11, 10A8, 10D1, 10G3, 11C9, 11F7, 11H3, 12G4, 12H3, 14B2, 14B7, 14B12, 15E9, 16H1, 18C2, 18G5, 21G12, 26G3, 28F11.

[0171] 1st arrays of 9 Klotho-6xHis specific clones recommended for native (untagged) Klotho ELISA development (OD450>2, Klotho-6xHis plate)—2E12, 4H4, 4H5, 5D12, 11C9, 11F7, 14B12, 26G3, 28F11.

[0172] 2nd array of 11 Klotho-6xHis specific clones recommended for native (untagged) Klotho ELISA development (OD450>1 and <2, Klotho-6xHis plate) - 1F6, 2E1, 3D2, 7A12, 7F9, 8G11, 10G3, 11H3, 14B7, 18C2, 18G5.

[0173] 1st array of 10 Klotho-6xHis and Klotho-Fc specific clones recommended for the development of ELISA capable to measure both, untagged and Klotho-Fc proteins (OD450 >1.7, Klotho-6xHis and Klotho-Fc plates)-1F6, 2E12, 4H4, 4H5, 8G11, 11C9, 11F7, 14B12, 26G3, 28F11.

[0174] 2nd array of 2 Klotho-6xHis and Klotho-Fc specific clones recommended for the development of ELISA capable to measure both, untagged and Klotho-Fc proteins (OD450>1.2 and <1.7, Klotho-6xHis and Klotho-Fc plates)—5D12, 14B7.

[0175] mIgG isotyping: mIgG isotyping of Klotho hybridoma selected clones: Antibody isotyping from selected hybridoma clone culture supernatants.

[0176] Samples of hybridoma culture media were used to determine antibody iso-types using Rapid ELISA Mouse mAb Isotyping kit (ThermoFisher, Cat#37503) following manufacturer's instructions.

[0177] The table below presents the results of mIgG isotyping of Klotho hybridoma selected clones.

[0178] Summary of Table 4: mIgG isotype determination:

[0179] 1F6, 2E12, 4H4, 4H5, 8G11 and 11F7: IgG1

[0180] 11C9, 14B12, 26G3 and 28F11: IgG2b

[0181] Quality Control: Indirect ELISA was performed for quality control: An ELISA plate was coated with unconjugated 6xHis tagged Klotho protein or Klotho-Fc protein at 0.5 ug/ml overnight at +4° C. in 50 mM Na-bicarbonate buffer. Purified 1F6, 2E12, 4H4, 4H5, 8G11, 11C9, 11F7, 14B12, 26G3, and 28F11 antibodies were applied in 5-fold serial dilutions starting at 500 ng/mL and the secondary antibody, goat anti-mouse HRP, was applied at 0.16 pg/ml. Reaction was developed for 7 minutes. Raw absorbance data at 450 nm and corresponding antibody titration curve.

TABLE 5
1. 6xHis tagged Klotho protein

| [Ab], | 1F6, | | 2E12, | | 4H4, | | 4H5, | | 8G11, | | 11C9, | | |
|---|---|---|---|---|---|---|---|---|---|---|---|---|---|
| ng/mL | Lot#180410A | | Lot#180410B | | Lot#180410C | | Lot#180410D | | Lot#180410E | | Lot#180410F | | |
| 500 | 0.051 | 0.048 | 0.047 | 0.047 | 0.048 | 0.048 | 0.048 | 0.045 | 0.046 | 0.046 | 0.048 | 0.048 | No antigen |
| 500 | 1.782 | 1.793 | 2.533 | 2.531 | 1.822 | 1.662 | 1.759 | 1.726 | 1.861 | 1.9 | 2.977 | 2.993 | |
| 100 | 0.827 | 0.852 | 1.398 | 1.327 | 0.681 | 0.684 | 0.712 | 0.67 | 0.695 | 0.789 | 1.994 | 2.207 | |
| 20 | 0.266 | 0.271 | 0.452 | 0.426 | 0.209 | 0.194 | 0.199 | 0.217 | 0.259 | 0.223 | 0.862 | 0.946 | |
| 4 | 0.096 | 0.102 | 0.152 | 0.143 | 0.09 | 0.08 | 0.082 | 0.086 | 0.091 | 0.087 | 0.251 | 0.32 | |
| 0.8 | 0.064 | 0.061 | 0.065 | 0.074 | 0.058 | 0.061 | 0.06 | 0.06 | 0.062 | 0.06 | 0.105 | 0.124 | |
| 0.16 | 0.056 | 0.055 | 0.062 | 0.058 | 0.052 | 0.059 | 0.056 | 0.052 | 0.055 | 0.062 | 0.064 | 0.067 | |
| 0 | 0.051 | 0.049 | 0.052 | 0.05 | 0.051 | 0.049 | 0.05 | 0.052 | 0.052 | 0.052 | 0.054 | 0.061 | |

| [Ab], | 11C9, | | 11F7, | | 14B12, | | 26G3, | | 28F11, | | |
|---|---|---|---|---|---|---|---|---|---|---|---|
| ng/mL | Lot#180410F | | Lot#180410G | | Lot#180410H | | Lot#180410I | | Lot#180410J | | |
| 500 | 0.071 | 0.067 | 0.059 | 0.058 | 0.06 | 0.062 | 0.08 | 0.072 | 0.076 | 0.073 | No antigen |
| 500 | 3.023 | 2.876 | 1.754 | 1.779 | 1.863 | 1.856 | 2.975 | 2.92 | 2.572 | 2.586 | |
| 100 | 2.171 | 1.859 | 0.472 | 0.506 | 0.88 | 0.857 | 2.103 | 2.145 | 1.44 | 1.565 | |
| 20 | 0.988 | 0.864 | 0.154 | 0.137 | 0.29 | 0.253 | 0.994 | 1.001 | 0.513 | 0.586 | |
| 4 | 0.28 | 0.282 | 0.075 | 0.072 | 0.122 | 0.102 | 0.291 | 0.341 | 0.175 | 0.191 | |
| 0.8 | 0.114 | 0.104 | 0.059 | 0.06 | 0.066 | 0.06 | 0.107 | 0.126 | 0.082 | 0.081 | |
| 0.16 | 0.051 | 0.068 | 0.057 | 0.054 | 0.053 | 0.055 | 0.075 | 0.065 | 0.057 | 0.059 | |
| 0 | 0.072 | 0.057 | 0.06 | 0.06 | 0.057 | 0.059 | 0.06 | 0.063 | 0.068 | 0.062 | |

2. Klotho-Fc protein

| [Ab], | 1F6, | | 2E12, | | 4H4, | | 4H5, | | 8G11, | | 11C9, | | |
|---|---|---|---|---|---|---|---|---|---|---|---|---|---|
| ng/mL | Lot#180410A | | Lot#180410B | | Lot#180410C | | Lot#180410D | | Lot#180410E | | Lot#180410F | | |
| 500 | 0.065 | 0.058 | 0.056 | 0.059 | 0.058 | 0.058 | 0.059 | 0.069 | 0.058 | 0.056 | 0.06 | 0.065 | No antigen |
| 500 | 1.328 | 1.307 | 1.78 | 1.838 | 1.333 | 1.37 | 1.366 | 1.25 | 1.325 | 1.352 | 2.74 | 2.756 | |
| 100 | 0.505 | 0.462 | 0.749 | 0.765 | 0.466 | 0.44 | 0.412 | 0.423 | 0.43 | 0.455 | 1.801 | 1.787 | |
| 20 | 0.176 | 0.146 | 0.241 | 0.223 | 0.151 | 0.147 | 0.14 | 0.135 | 0.15 | 0.144 | 0.742 | 0.732 | |
| 4 | 0.087 | 0.088 | 0.094 | 0.093 | 0.075 | 0.076 | 0.076 | 0.078 | 0.079 | 0.072 | 0.231 | 0.322 | |
| 0.8 | 0.073 | 0.065 | 0.062 | 0.063 | 0.057 | 0.057 | 0.058 | 0.061 | 0.06 | 0.058 | 0.101 | 0.127 | |
| 0.16 | 0.068 | 0.065 | 0.061 | 0.058 | 0.056 | 0.057 | 0.057 | 0.058 | 0.055 | 0.055 | 0.067 | 0.148 | |
| 0 | 0.07 | 0.07 | 0.065 | 0.057 | 0.07 | 0.059 | 0.056 | 0.075 | 0.06 | 0.063 | 0.096 | 0.112 | |

| [Ab], | 11C9, | | 11F7, | | 14B12, | | 26G3, | | 28F11, | | |
|---|---|---|---|---|---|---|---|---|---|---|---|
| ng/mL | Lot#180410F | | Lot#180410G | | Lot#180410H | | Lot#180410I | | Lot#180410J | | |
| 500 | 0.072 | 0.065 | 0.058 | 0.057 | 0.06 | 0.06 | 0.066 | 0.063 | 0.063 | 0.065 | No antigen |
| 500 | 2.623 | 2.613 | 0.798 | 0.82 | 2.044 | 2.085 | 2.641 | 2.607 | 2.417 | 2.325 | |
| 100 | 1.886 | 1.686 | 0.291 | 0.288 | 1.047 | 1.012 | 1.822 | 1.784 | 1.337 | 1.427 | |
| 20 | 0.816 | 0.717 | 0.104 | 0.108 | 0.33 | 0.316 | 0.828 | 0.787 | 0.54 | 0.558 | |
| 4 | 0.23 | 0.24 | 0.067 | 0.066 | 0.125 | 0.135 | 0.265 | 0.267 | 0.165 | 0.171 | |
| 0.8 | 0.183 | 0.101 | 0.056 | 0.061 | 0.071 | 0.069 | 0.106 | 0.104 | 0.083 | 0.083 | |
| 0.16 | 0.078 | 0.068 | 0.059 | 0.058 | 0.057 | 0.058 | 0.063 | 0.058 | 0.059 | 0.059 | |
| 0 | 0.076 | 0.066 | 0.066 | 0.061 | 0.057 | 0.06 | 0.057 | 0.057 | 0.059 | 0.066 | |

[0182] See also, dose responsive curve illustrated in FIGS. 5A, 5B, and 6 respectively.

[0183] Quality control: Purity and integrity of purified antibody were analyzed in 4-20% SDS-PAGE (reducing and non-reducing) stained with GelCode Blue reagent. See FIGS. 7A and 7B, respectively.

[0184] Polyclonal IgY antibodies: Polyclonal IgY antibodies were also developed. The above design was adapted as necessary for production of polyclonal IgY antibodies in chickens.

[0185] Chicken serum IgY titer evaluation using target antigens, by indirect ELISA (TMB: 5 mM). Read at 450 nm

[0186] Antigen: Klotho 1 ug/mL (0.78 mg/mL, Lot# 170918A) in 50 mM Na-bicarbonate.

[0187] Samples: Chicken #1, #2, RT, 1 hr (5% milk in PBS).

[0188] An ELISA plate was coated with 6xHis tagged Klotho protein or Klotho-Fc protein at 0.5 ug/ml overnight at +4° C. in 50 mM Na-bicarbonate buffer. Purified anti-Klotho IgY antibody (lot# 180327A) was applied in 5-fold serial dilutions starting at 1000 ng/mL and the secondary antibody, goat anti-chicken HRP, was applied at 0.16 μg/ml. Reaction was developed for 5 minutes. Raw absorbance data at 450 nm and corresponding antibody titration curve. See also, FIGS. 8A-8B.

TABLE 7

| [IgY], | Antigen | |
|---|---|---|
| ng/mL | Klotho | Klotho-Fc |

| | | | | | |
|---|---|---|---|---|---|
| 1000 | 0.047 | 0.046 | 0.046 | 0.054 | No Antigen |
| 1000 | 2.192 | 2.179 | 2.137 | 2.171 | |
| 200 | 1.916 | 1.795 | 1.797 | 1.942 | |
| 40 | 1.076 | 1.032 | 0.865 | 0.9 | |
| 8 | 0.354 | 0.337 | 0.328 | 0.293 | |
| 1.6 | 0.123 | 0.118 | 0.106 | 0.109 | |
| 0.32 | 0.063 | 0.073 | 0.058 | 0.062 | |
| 0 | 0.046 | 0.047 | 0.047 | 0.045 | |

[0189] Summary—Both HRP and Biotin-anti-Klotho IgY show significant signal in indirect ELISA. Bio-IgY has stronger signal than HRP-IgY.

[0190] As illustrated in FIGS. 9A and 9B, there is a relatively weak signal in IgY/HRP-IgY pair. IgY/Bio-IgY shows relatively high background, even at low concentration (0.25 μg/mL). IgY/Bio-4H5 pair appears to work better than IgY/labled-IgY pair.

[0191] It has been postulated that levels of circulating, soluble Klotho protein in the serum of mammals decrease with increasing age. Baseline measurement for naturally-occurring, circulating soluble Klotho protein in a human subject has been reported in various publications. A thorough literature review yielded the following average range(s) for circulating soluble Klotho protein in the indicated human subject (see Tables 8-9).

TABLE 8

| Age | Sex | |
|---|---|---|
| group | Healthy male | Healthy female |
| 0-15 | 1692 (372, 5694) | 2487 (964, 5866) |
| 15-35 | 459.4 (335.1-617.2)-508 (448-661) | 459.4 (335.1-617.2)-508 (448-661) |
| 35-50 | 476.9 (416.9-545.5)-692 (618-866) | 476.9 (416.9-545.5)-692 (618-866) |
| 50-65 | 141.8 (94.7-189.2)-377.17 (359.46-394.90) | 141.8 (94.7-189.2)-377.17 (359.46-394.90) |
| >65 | 354 (264-410)-999.5 (887.7-1186.4) | 354 (264-410)-999.5 (887.7-1186.4) |
| Age | Disease | |
| group | GH deficiency | CKD all |
| 0-15 | 340 (433, 7826) | 1746 (671-3438) |
| 15-35 | | |
| 35-50 | | 396.3 (306.3-558.4)-478 (348-658) |
| 50-65 | | 613.0 (504.0 to 811.0)-809 (674-981) |
| >65 | | Men 596.0 (464.3 to 790.3); Women 614.0 |
| | | (558.0 to 811.0) |
| Age | | |
| group | CKD stage 1-2 | CKD stage 3 |
| 0-15 | 1418 (501-3314)-1736.5 (1272-2737) | 1418 (501-3314)-1736.5 (1272-2737) |
| 15-35 | | |
| 35-50 | 540.5 (371.3-824.8)-482.7 (360.2-683.1) | 386.4 (319.2-456.7) |
| 50-65 | 388 (254-532) | 316 (199-464)-337 (217-489) |
| >65 | | |
| Age | | |
| group | CKD stage 4 | CKD stage 5 |
| 0-15 | 1019 (502-1592)-1418 (501-3314) | 1019 (502-1592)-1418 (501-3314) |
| 15-35 | | |
| 35-50 | 337.8 (251.0-444.2) | 295.6 (207.7-387.5) |
| 50-65 | 215 (135-331) | 249 (100-452) |
| >65 | Mean ± SEM 473.9 ± 121.4 | Mean ± SEM 546 ± 164.3 |
| Age | | |
| group | Kidney transplant | T1D |
| 0-15 | 1698 (1110-2123) | |
| 15-35 | | 454 (420-492) |
| 35-50 | | 659.3 (525.3, 827.6)-787.7 (629.5, 1007) |
| 50-65 | 550 (304-651)-605 (506-784) | |
| >65 | | |
| Age | | |
| group | T2D | CAD |
| 0-15 | | |
| 15-35 | | |
| 35-50 | 572.4 (541.9-604.6) | |
| 50-65 | Men 67.3 (52.8-69.3); Women 65.7 (51.6-71.6) | 490.5 (349.0-549.4) |
| >65 | 493.7 (287.8-777.7) | Men 45.1 (33.7-54.1); Women 40.7 (31-56.4) |
| Age | | |
| group | COPD | MS |
| 0-15 | | |
| 15-35 | | new cases Mean ± SEM 585.56 ± 153.99; |
| | | chronic cases Mean ± SEM 696.94 ± 170.52 |
| 35-50 | | |
| 50-65 | | |
| >65 | 250 (168-330) | |

TABLE 9

| | KL-VS genotype | | |
|---|---|---|---|
| Age group | Non carrier | Heterozygous | Homozygous |
| >65 | Mean ± SEM | Mean ± SEM | Mean ± SEM |
| | 780.9 ± 19.6 | 891.7 ± 45.3 | 599.1 ± 75.7 |

[0192] In the table, above, CKD: chronic kidney disease; GH: growth hormone; T1D: type 1 diabetes; T2D: type 2 diabetes; CAD: coronary artery disease; COPD: chronic obstructive pulmonary disease; MS: multiple sclerosis.

[0193] In light of the variability observed in the literature, a more robust, more consistent, and/or more accurate means of measuring serum Klotho levels is needed. Embodiments of the present disclosure include a Klotho diagnostic kit and method of using the same, as described in further detail, below.

[0194] Table 10 presents a baseline measurement for naturally-occurring, circulating soluble Klotho protein in a human subject (prior to receiving any treatment, e.g., health supplement, pharmaceutical, therapeutic protein, etc.). FIG. 10 is a graphical representation of the (daily) change in circulating Klotho protein levels in a human subject

TABLE 10

| Time Collected | [Klotho] (ng/mL) |
|---|---|
| 0650 | 0.579 |
| 0750 | 0.782 |
| 0850 | 0.66 |
| 0950 | 0.717 |
| 1050 | 0.611 |
| 1150 | 0.596 |
| 1255 | 0.597 |
| 1645 | 0.56 |
| 1745 | 0.556 |
| 1845 | 0.588 |
| 1945 | 0.592 |
| 2045 | 0.638 |
| 2155 | 0.551 |

[0195] Once per hour, beginning at 0650 hours, a blood sample was taken from the human subject and Klotho protein levels were measured by ELISA.

[0196] Quantitative ELISA according to an embodiment of the present disclosure is able to detect (1) Native (e.g., endogenous) Klotho, (2) recombinant Klotho-Fc fusion, and (3) recombinant 6xHis Klotho in human plasma samples.

[0197] Further measurements of Klotho protein are illustrated and presented in FIGS. 11A-11B and Table 11, below.

TABLE 11

| | Adjusted Calculated consentration of Klotho (pg/mL) | | | |
|---|---|---|---|---|
| | | | IgY/4H5 with | |
| Pooled Human | IBL | IgY/ | mouse IgG in | IgY/ |
| Serum Dilution | Kits | 4H5 | Assay Diluent | 14B12 |
| Neat | 6125.652* | 331.86 | 99.732 | 233.301 |
| 1:02 | 838.748 | 263.299 | 92.946 | 394.267 |
| 1:04 | 859.529 | 585.664 | 21.05 | 511.614 |
| 1:08 | 813.752 | Out of Range | 580.529 | 700.209 |

*Kits manual recommend sample dilution at 1:2 or 1:4

### Klotho Stability in Human Plasma Using ELISA Kit

[0198] Samples of venous and capillary (“finger”) blood were collected from four donors (A, B, C, D) and stored in (i) EDTA or (ii) heparin containing tubes. 1.5 ng/mL of Klotho (lot# 170918A—human soluble alpha Klotho) was spiked into a set of venous and capillary samples collected from donor A. Collected blood (blood samples) were stored at room temperature for 0, 1, 4, 16, 24, 48, 72, 96, or 168 h, then spun-down. Plasma from each sample was stored at −80° C. prior to ELISA test. ELISA plate maps, raw data, standard curve data, and concentrations are presented in Tables 12-21, below.
[0199] ELISA plate map 1:

TABLE 12

| | | | | | |
|---|---|---|---|---|---|
| STD, 6 ng/mL | A (0 h) EDTA | A (1 h) EDTA | A (4 h) EDTA | A (16 h) EDTA | A (24 h) EDTA |
| STD, 3 ng/mL | A (48 h) EDTA | A (72 h) EDTA | A (96 h) EDTA | A (168 h) EDTA | A (Finger) EDTA |
| STD, 1.5 ng/mL | A (0 h) Heparin | A (1 h) Heparin | A (4 h) Heparin | A (16 h) Heparin | A (24 h) Heparin |
| STD, 0.75 ng/mL | A (48 h) Heparin | A (72 h) Heparin | A (96 h) Heparin | A (168 h) Heparin | A (Finger) Heparin |
| STD, 0.375 ng/mL | B (0 h) EDTA | B (1 h) EDTA | B (4 h) EDTA | B (16 h) EDTA | B (24 h) EDTA |
| STD, 0.188 ng/mL | B (48 h) EDTA | B (72 h) EDTA | B (96 h) EDTA | B (168 h) EDTA | B (Finger) EDTA |
| STD, 0.094 ng/mL | B (0 h) Heparin | B (1 h) Heparin | B (4 h) Heparin | B (16 h) Heparin | B (24 h) Heparin |
| STD, 0 ng/mL | B (48 h) Heparin | B (72 h) Heparin | B (96 h) Heparin | B (168 h) Heparin | B (Finger) Heparin |

[0200] ELISA plate map 2:

TABLE 13

| | | | | | |
|---|---|---|---|---|---|
| STD, 6 ng/mL | C (0 h) EDTA | C (1 h) EDTA | C (4 h) EDTA | C (16 h) EDTA | C (24 h) EDTA |
| STD, 3 ng/mL | C (48 h) EDTA | C (72 h) EDTA | C (96 h) EDTA | C (168 h) EDTA | C (Finger) EDTA |
| STD, 1.5 ng/mL | C (0 h) Heparin | C (1 h) Heparin | C (4 h) Heparin | C (16 h) Heparin | C (24 h) Heparin |
| STD, 0.75 ng/mL | C (48 h) Heparin | C (72 h) Heparin | C (96 h) Heparin | C (168 h) Heparin | C (Finger) Heparin |
| STD, 0.375 ng/mL | D (0 h) EDTA | D (1 h) EDTA | D (4 h) EDTA | D (16 h) EDTA | D (24 h) EDTA |
| STD, 0.188 ng/mL | D (48 h) EDTA | D (72 h) EDTA | D (96 h) EDTA | D (168 h) EDTA | D (Finger) EDTA |
| STD, 0.094 ng/mL | D (0 h) Heparin | D (1 h) Heparin | D (4 h) Heparin | D (16 h) Heparin | D (24 h) Heparin |
| STD, 0 ng/mL | D (48 h) Heparin | D (72 h) Heparin | D (96 h) Heparin | D (168 h) Heparin | D (Finger) Heparin |

[0201] ELISA plate map 3:

TABLE 14

| | | | |
|---|---|---|---|
| STD, 6 ng/mL | Spike (0 h) EDTA | Spike (168 h) EDTA | Spike (72 h) Heparin |
| STD, 3 ng/mL | Spike (1 h) EDTA | Spike (Finger) EDTA | Spike (96 h) Heparin |
| STD, 1.5 ng/mL | Spike (4 h) EDTA | Spike (0 h) Heparin | Spike (168 h) EDTA |
| STD, 0.75 ng/mL | Spike (16 h) EDTA | Spike (1 h) Heparin | Spike (Finger) Heparin |
| STD, 0.375 ng/mL | Spike (24 h) EDTA | Spike (4 h) Heparin | |
| STD, 0.188 ng/mL | Spike (48 h) EDTA | Spike (16 h) Heparin | |
| STD, 0.094 ng/mL | Spike (72 h) EDTA | Spike (24 h) Heparin | |
| STD, 0 ng/mL | Spike (96 h) EDTA | Spike (48 h) Heparin | |

[0202] ELISA 450 nm absorbance raw data (plate 1):

TABLE 15

| | | | | | | | | | | | |
|---|---|---|---|---|---|---|---|---|---|---|---|
| 3.44 | 3.39 | 0.238 | 0.231 | 0.231 | 0.247 | 0.235 | 0.233 | 0.248 | 0.244 | 0.261 | 0.276 |
| 2.03 | 2.005 | 0.235 | 0.235 | 0.242 | 0.235 | 0.247 | 0.248 | 0.254 | 0.264 | 0.283 | 0.282 |
| 1.117 | 1.077 | 0.239 | 0.241 | 0.229 | 0.236 | 0.236 | 0.248 | 0.253 | 0.264 | 0.256 | 0.283 |
| 0.593 | 0.573 | 0.237 | 0.23 | 0.241 | 0.248 | 0.239 | 0.26 | 0.252 | 0.248 | 0.254 | 0.258 |
| 0.31 | 0.328 | 0.162 | 0.157 | 0.16 | 0.163 | 0.162 | 0.161 | 0.173 | 0.173 | 0.184 | 0.181 |
| 0.206 | 0.202 | 0.167 | 0.178 | 0.17 | 0.172 | 0.173 | 0.177 | 0.18 | 0.174 | 0.182 | 0.199 |
| 0.133 | 0.131 | 0.162 | 0.173 | 0.175 | 0.172 | 0.174 | 0.172 | 0.173 | 0.176 | 0.176 | 0.185 |
| 0.059 | 0.059 | 0.177 | 0.18 | 0.181 | 0.182 | 0.176 | 0.163 | 0.165 | 0.185 | 0.182 | 0.19 |

[0203] ELISA 450 nm absorbance raw data (plate 2):

TABLE 16

| | | | | | | | | | | | |
|---|---|---|---|---|---|---|---|---|---|---|---|
| 3.409 | 3.302 | 0.228 | 0.223 | 0.237 | 0.237 | 0.232 | 0.233 | 0.24 | 0.233 | 0.26 | 0.275 |
| 1.986 | 1.904 | 0.246 | 0.239 | 0.242 | 0.247 | 0.244 | 0.242 | 0.251 | 0.256 | 0.227 | 0.251 |
| 1.066 | 1.052 | 0.229 | 0.226 | 0.222 | 0.228 | 0.226 | 0.236 | 0.234 | 0.246 | 0.244 | 0.251 |
| 0.589 | 0.56 | 0.225 | 0.233 | 0.242 | 0.238 | 0.266 | 0.239 | 0.25 | 0.251 | 0.244 | 0.23 |
| 0.329 | 0.327 | 0.192 | 0.181 | 0.165 | 0.174 | 0.187 | 0.174 | 0.196 | 0.168 | 0.174 | 0.163 |
| 0.195 | 0.195 | 0.174 | 0.176 | 0.184 | 0.188 | 0.196 | 0.184 | 0.205 | 0.172 | 0.169 | 0.17 |
| 0.136 | 0.129 | 0.136 | 0.165 | 0.177 | 0.165 | 0.163 | 0.171 | 0.191 | 0.168 | 0.177 | 0.186 |
| 0.064 | 0.072 | 0.19 | 0.177 | 0.184 | 0.177 | 0.198 | 0.188 | 0.197 | 0.18 | 0.17 | 0.167 |

[0204] ELISA 450 nm absorbance raw data (plate 3):

TABLE 17

| | | | | | | | |
|---|---|---|---|---|---|---|---|
| 3.482 | 3.393 | 0.449 | 0.442 | 0.553 | 0.558 | 0.51 | 0.506 |
| 2.04 | 1.976 | 0.438 | 0.429 | 0.587 | 0.603 | 0.501 | 0.509 |
| 1.11 | 1.087 | 0.426 | 0.427 | 0.506 | 0.498 | 0.481 | 0.503 |
| 0.6 | 0.577 | 0.442 | 0.441 | 0.514 | 0.518 | 0.568 | 0.524 |
| 0.341 | 0.331 | 0.471 | 0.453 | 0.506 | 0.522 | | |
| 0.202 | 0.201 | 0.47 | 0.462 | 0.537 | 0.548 | | |
| 0.137 | 0.137 | 0.514 | 0.517 | 0.54 | 0.537 | | |
| 0.062 | 0.064 | 0.558 | 0.539 | 0.564 | 0.57 | | |

[0205] Calculation: Standard curve 1:

TABLE 18

| | | | Back | | | | |
|---|---|---|---|---|---|---|---|
| | Concentration | | Conc. | | Mean | Std. | CV |
| Sample | (ng/mL) | Wells | Calc. | Values | Value | Dev. | % |
| St01 | 6 | A1 | 6.062 | 3.44 | 3.415 | 0.035 | 1 |
| | | A2 | 5.934 | 3.39 | | | |
| St02 | 3 | B1 | 3.03 | 2.03 | 2.018 | 0.018 | 0.9 |
| | | B2 | 2.985 | 2.005 | | | |
| St03 | 1.5 | C1 | 1.525 | 1.117 | 1.097 | 0.028 | 2.6 |
| | | C2 | 1.464 | 1.077 | | | |
| St04 | 0.75 | D1 | 0.758 | 0.593 | 0.583 | 0.014 | 2.4 |
| | | D2 | 0.73 | 0.573 | | | |
| St05 | 0.375 | E1 | 0.358 | 0.31 | 0.319 | 0.013 | 4 |
| | | E2 | 0.384 | 0.328 | | | |
| St06 | 0.188 | F1 | 0.21 | 0.206 | 0.204 | 0.003 | 1.4 |
| | | F2 | 0.204 | 0.202 | | | |
| St07 | 0.094 | G1 | 0.102 | 0.133 | 0.132 | 0.001 | 1.1 |
| | | G2 | 0.099 | 0.131 | | | |
| St08 | 0 | H1 | Range | 0.059 | 0.059 | 0 | 0 |
| | | H2 | Range | 0.059 | | | |

| | | | | | |
|---|---|---|---|---|---|
| Concentration: 1y = ((A − D)/ | A | B | C | D | R\hat{ }2 |
| (1 + (x/C)\hat{ }B)) + D: | | | | | |
| Std (Standards: Concentration | 0.069 | 1.0781 | 0.627 | 9.614 | 1 |
| vs MeanValue) | | | | | |

[0206] Calculation: Standard curve 2:

TABLE 19

| | Concen- | | Back | | | | |
|---|---|---|---|---|---|---|---|
| | tration | | Conc. | | Mean | Std. | CV |
| Sample | (ng/mL) | Wells | Calc. | Values | Value | Dev. | % |
| St01 | 6 | A1 | 6.13 | 3.409 | 3.356 | 0.076 | 2.3 |
| | | A2 | 5.868 | 3.302 | | | |
| St02 | 3 | B1 | 3.082 | 1.986 | 1.945 | 0.058 | 3 |
| | | B2 | 2.931 | 1.904 | | | |
| St03 | 1.5 | C1 | 1.504 | 1.066 | 1.059 | 0.01 | 0.9 |
| | | C2 | 1.482 | 1.052 | | | |
| St04 | 0.75 | D1 | 0.769 | 0.589 | 0.575 | 0.021 | 3.6 |
| | | D2 | 0.726 | 0.56 | | | |
| St05 | 0.375 | E1 | 0.385 | 0.329 | 0.328 | 0.001 | 0.4 |
| | | E2 | 0.382 | 0.327 | | | |
| St06 | 0.188 | F1 | 0.188 | 0.195 | 0.195 | 0 | 0 |
| | | F2 | 0.188 | 0.195 | | | |
| St07 | 0.094 | G1 | 0.1 | 0.136 | 0.133 | 0.005 | 3.7 |
| | | G2 | 0.09 | 0.129 | | | |
| St08 | 0 | H1 | Range | 0.064 | 0.068 | 0.006 | 8.3 |
| | | H2 | 0.002 | 0.072 | | | |

| | | | | | |
|---|---|---|---|---|---|
| Concentration: 1y = ((A − D)/ | A | B | C | D | R\hat{ }2 |
| (1 + (x/C)\hat{ }B)) + D: | | | | | |
| Std (Standards: Concentration | 0.071 | 1.039 | 14.67 | 11.673 | 1 |
| vs MeanValue) | | | | | |

[0207] Calculation: Standard curve 3:

TABLE 20

| | Concen- | | Back | | | | |
|---|---|---|---|---|---|---|---|
| | tration | | Conc. | | Mean | Std. | CV |
| Sample | (ng/mL) | Wells | Calc. | Values | Value | Dev. | % |
| St01 | 6 | A1 | 6.108 | 3.482 | 3.438 | 0.063 | 1.8 |
| | | A2 | 5.89 | 3.393 | | | |
| St02 | 3 | B1 | 3.063 | 2.04 | 2.008 | 0.045 | 2.3 |
| | | B2 | 2.948 | 1.976 | | | |
| St03 | 1.5 | C1 | 1.514 | 1.11 | 1.099 | 0.016 | 1.5 |
| | | C2 | 1.479 | 1.087 | | | |
| St04 | 0.75 | D1 | 0.757 | 0.6 | 0.589 | 0.016 | 2.8 |
| | | D2 | 0.724 | 0.577 | | | |
| St05 | 0.375 | E1 | 0.389 | 0.341 | 0.336 | 0.007 | 2.1 |
| | | E2 | 0.375 | 0.331 | | | |
| St06 | 0.188 | F1 | 0.193 | 0.202 | 0.202 | 0.001 | 0.4 |
| | | F2 | 0.192 | 0.201 | | | |
| St07 | 0.094 | G1 | 0.1 | 0.137 | 0.137 | 0 | 0 |
| | | G2 | 0.1 | 0.137 | | | |
| St08 | 0 | H1 | Range | 0.062 | 0.063 | 0.001 | 2.2 |
| | | H2 | Range | 0.064 | | | |

| | | | | | |
|---|---|---|---|---|---|
| Concentration: 1y = ((A − D)/ | A | B | C | D | R\hat{ }2 |
| (1 + (x/C)\hat{ }B)) + D: | | | | | |
| Std (Standards: Concentration | 0.07 | 1.043 | 13.427 | 11.242 | 1 |
| vs MeanValue) | | | | | |

[0208] Calculation: human plasma samples:

TABLE 21

| | | | | Mean | | | | Klotho |
|---|---|---|---|---|---|---|---|---|
| Sample | Wells | Values | Result | Result | Std. Dev. | CV % | Dilution | (ng/mL) |
| A (0 h) | A3 | 0.238 | 0.256 | 0.251 | 0.007 | 2.8 | 4 | 1.003 |
| EDTA | A4 | 0.231 | 0.246 | | | | | |
| A (1 h) | A5 | 0.231 | 0.246 | 0.257 | 0.016 | 6.3 | 4 | 1.028 |
| EDTA | A6 | 0.247 | 0.269 | | | | | |
| A (4 h) | A7 | 0.235 | 0.251 | 0.25 | 0.002 | 0.8 | 4 | 1 |
| EDTA | A8 | 0.233 | 0.249 | | | | | |
| A (16 h) | A9 | 0.248 | 0.27 | 0.267 | 0.004 | 1.5 | 4 | 1.068 |
| EDTA | A10 | 0.244 | 0.264 | | | | | |
| A (24 h) | A11 | 0.261 | 0.289 | 0.299 | 0.015 | 5 | 4 | 1.197 |
| EDTA | A12 | 0.276 | 0.31 | | | | | |
| A (48 h) | B3 | 0.235 | 0.251 | 0.251 | 0 | 0 | 4 | 1.006 |
| EDTA | B4 | 0.235 | 0.251 | | | | | |
| A (72 h) | B5 | 0.242 | 0.261 | 0.256 | 0.007 | 2.8 | 4 | 1.026 |
| EDTA | B6 | 0.235 | 0.251 | | | | | |
| A (96 h) | B7 | 0.247 | 0.269 | 0.269 | 0.001 | 0.4 | 4 | 1.077 |
| EDTA | B8 | 0.248 | 0.27 | | | | | |
| A (168 h) | B9 | 0.254 | 0.279 | 0.286 | 0.01 | 3.5 | 4 | 1.143 |
| EDTA | B10 | 0.264 | 0.293 | | | | | |
| A (Finger) | B11 | 0.283 | 0.32 | 0.319 | 0.001 | 0.3 | 4 | 1.276 |
| EDTA | B12 | 0.282 | 0.318 | | | | | |
| A (0 h) | C3 | 0.239 | 0.257 | 0.259 | 0.002 | 0.8 | 4 | 1.034 |
| Heparin | C4 | 0.241 | 0.26 | | | | | |
| A (1 h) | C5 | 0.229 | 0.243 | 0.248 | 0.007 | 2.9 | 4 | 0.991 |
| Heparin | C6 | 0.236 | 0.253 | | | | | |
| A (4 h) | C7 | 0.236 | 0.253 | 0.261 | 0.012 | 4.6 | 4 | 1.046 |
| Heparin | C8 | 0.248 | 0.27 | | | | | |
| A (16 h) | C9 | 0.253 | 0.277 | 0.285 | 0.011 | 3.9 | 4 | 1.14 |
| Heparin | C10 | 0.264 | 0.293 | | | | | |
| A (24 h) | C11 | 0.256 | 0.281 | 0.301 | 0.027 | 9 | 4 | 1.202 |
| Heparin | C12 | 0.283 | 0.32 | | | | | |
| A (48 h) | D3 | 0.237 | 0.254 | 0.249 | 0.007 | 2.8 | 4 | 0.997 |
| Heparin | D4 | 0.23 | 0.244 | | | | | |
| A (72 h) | D5 | 0.241 | 0.26 | 0.265 | 0.007 | 2.7 | 4 | 1.06 |
| Heparin | D6 | 0.248 | 0.27 | | | | | |
| A (96 h) | D7 | 0.239 | 0.257 | 0.272 | 0.021 | 7.8 | 4 | 1.088 |
| Heparin | D8 | 0.26 | 0.287 | | | | | |
| A (168 h) | D9 | 0.252 | 0.276 | 0.273 | 0.004 | 1.5 | 4 | 1.091 |
| Heparin | D10 | 0.248 | 0.27 | | | | | |
| A (Finger) | D11 | 0.254 | 0.279 | 0.279 | 0 | 0 | 4 | 1.114 |
| Heparin | D12 | 0.066 | Range | | | | | |
| B (0 h) | E3 | 0.162 | 0.146 | 0.142 | 0.005 | 3.7 | 4 | 0.568 |
| EDTA | E4 | 0.157 | 0.138 | | | | | |
| B (1 h) | E5 | 0.16 | 0.143 | 0.145 | 0.003 | 2.2 | 4 | 0.579 |
| EDTA | E6 | 0.163 | 0.147 | | | | | |
| B (4 h) | E7 | 0.162 | 0.146 | 0.145 | 0.001 | 0.7 | 4 | 0.579 |
| EDTA | E8 | 0.161 | 0.144 | | | | | |
| B (16 h) | E9 | 0.173 | 0.162 | 0.162 | 0 | 0 | 4 | 0.647 |
| EDTA | E10 | 0.173 | 0.162 | | | | | |
| B (24 h) | E11 | 0.184 | 0.178 | 0.176 | 0.003 | 1.8 | 4 | 0.702 |
| EDTA | E12 | 0.181 | 0.173 | | | | | |
| B (48 h) | F3 | 0.167 | 0.153 | 0.161 | 0.011 | 7.1 | 4 | 0.644 |
| EDTA | F4 | 0.178 | 0.169 | | | | | |
| B (72 h) | F5 | 0.17 | 0.157 | 0.159 | 0.002 | 1.3 | 4 | 0.635 |
| EDTA | F6 | 0.172 | 0.16 | | | | | |
| B (96 h) | F7 | 0.173 | 0.162 | 0.165 | 0.004 | 2.5 | 4 | 0.659 |
| EDTA | F8 | 0.177 | 0.168 | | | | | |
| B (168 h) | F9 | 0.18 | 0.172 | 0.168 | 0.006 | 3.7 | 4 | 0.67 |
| EDTA | F10 | 0.174 | 0.163 | | | | | |
| B (Finger) | F11 | 0.182 | 0.175 | 0.187 | 0.017 | 9.3 | 4 | 0.749 |
| EDTA | F12 | 0.199 | 0.2 | | | | | |
| B (0 h) | G3 | 0.162 | 0.146 | 0.154 | 0.011 | 7.4 | 4 | 0.615 |
| Heparin | G4 | 0.173 | 0.162 | | | | | |
| B (1 h) | G5 | 0.175 | 0.165 | 0.162 | 0.003 | 1.9 | 4 | 0.65 |
| Heparin | G6 | 0.172 | 0.16 | | | | | |
| B (4 h) | G7 | 0.174 | 0.163 | 0.162 | 0.002 | 1.3 | 4 | 0.647 |
| Heparin | G8 | 0.172 | 0.16 | | | | | |
| B (16 h) | G9 | 0.173 | 0.162 | 0.164 | 0.003 | 1.9 | 4 | 0.656 |
| Heparin | G10 | 0.176 | 0.166 | | | | | |
| B (24 h) | G11 | 0.176 | 0.166 | 0.173 | 0.009 | 5.4 | 4 | 0.691 |
| Heparin | G12 | 0.185 | 0.179 | | | | | |
| B (48 h) | H3 | 0.177 | 0.168 | 0.17 | 0.003 | 1.8 | 4 | 0.679 |
| Heparin | H4 | 0.18 | 0.172 | | | | | |
| B (72 h) | H5 | 0.181 | 0.173 | 0.174 | 0.001 | 0.6 | 4 | 0.697 |
| Heparin | H6 | 0.182 | 0.175 | | | | | |
| B (96 h) | H7 | 0.176 | 0.166 | 0.157 | 0.013 | 8.6 | 4 | 0.626 |
| Heparin | H8 | 0.163 | 0.147 | | | | | |
| B (168 h) | H9 | 0.165 | 0.15 | 0.165 | 0.021 | 12.6 | 4 | 0.658 |
| Heparin | H10 | 0.185 | 0.179 | | | | | |
| B (Finger) | H11 | 0.182 | 0.175 | 0.181 | 0.008 | 4.6 | 4 | 0.723 |
| Heparin | H12 | 0.19 | 0.187 | | | | | |
| C (0 h) | A3 | 0.228 | 0.236 | 0.233 | 0.005 | 2.2 | 4 | 0.931 |
| EDTA | A4 | 0.223 | 0.229 | | | | | |
| C (1 h) | A5 | 0.237 | 0.25 | 0.25 | 0 | 0 | 4 | 0.998 |
| EDTA | A6 | 0.237 | 0.25 | | | | | |
| C (4 h) | A7 | 0.232 | 0.242 | 0.243 | 0.001 | 0.4 | 4 | 0.972 |
| EDTA | A8 | 0.233 | 0.244 | | | | | |
| C (16 h) | A9 | 0.24 | 0.254 | 0.249 | 0.007 | 2.9 | 4 | 0.996 |
| EDTA | A10 | 0.233 | 0.244 | | | | | |
| C (24 h) | A11 | 0.26 | 0.283 | 0.294 | 0.016 | 5.3 | 4 | 1.177 |
| EDTA | A12 | 0.275 | 0.305 | | | | | |
| C (48 h) | B3 | 0.246 | 0.263 | 0.258 | 0.007 | 2.8 | 4 | 1.031 |
| EDTA | B4 | 0.239 | 0.253 | | | | | |
| C (72 h) | B5 | 0.242 | 0.257 | 0.261 | 0.005 | 2 | 4 | 1.042 |
| EDTA | B6 | 0.247 | 0.264 | | | | | |
| C (96 h) | B7 | 0.244 | 0.26 | 0.258 | 0.002 | 0.8 | 4 | 1.034 |
| EDTA | B8 | 0.242 | 0.257 | | | | | |
| C (168 h) | B9 | 0.251 | 0.27 | 0.274 | 0.005 | 1.9 | 4 | 1.095 |
| EDTA | B10 | 0.256 | 0.277 | | | | | |
| C (Finger) | B11 | 0.227 | 0.235 | 0.253 | 0.025 | 9.9 | 4 | 1.01 |
| EDTA | B12 | 0.251 | 0.27 | | | | | |
| C (0 h) | C3 | 0.229 | 0.238 | 0.236 | 0.003 | 1.3 | 4 | 0.943 |
| Heparin | C4 | 0.226 | 0.233 | | | | | |
| C (1 h) | C5 | 0.222 | 0.228 | 0.232 | 0.006 | 2.7 | 4 | 0.928 |
| Heparin | C6 | 0.228 | 0.236 | | | | | |
| C (4 h) | C7 | 0.226 | 0.233 | 0.241 | 0.01 | 4.3 | 4 | 0.963 |
| Heparin | C8 | 0.236 | 0.248 | | | | | |
| C (16 h) | C9 | 0.234 | 0.245 | 0.254 | 0.012 | 4.9 | 4 | 1.016 |
| Heparin | C10 | 0.246 | 0.263 | | | | | |
| C (24 h) | C11 | 0.244 | 0.26 | 0.265 | 0.007 | 2.7 | 4 | 1.06 |
| Heparin | C12 | 0.251 | 0.27 | | | | | |
| C (48 h) | D3 | 0.225 | 0.232 | 0.238 | 0.008 | 3.5 | 4 | 0.951 |
| Heparin | D4 | 0.233 | 0.244 | | | | | |
| C (72 h) | D5 | 0.242 | 0.257 | 0.254 | 0.004 | 1.6 | 4 | 1.016 |
| Heparin | D6 | 0.238 | 0.251 | | | | | |
| C (96 h) | D7 | 0.266 | 0.292 | 0.272 | 0.028 | 10.3 | 4 | 1.089 |
| Heparin | D8 | 0.239 | 0.253 | | | | | |
| C (168 h) | D9 | 0.25 | 0.269 | 0.269 | 0.001 | 0.4 | 4 | 1.078 |
| Heparin | D10 | 0.251 | 0.27 | | | | | |
| C (Finger) | D11 | 0.244 | 0.26 | 0.25 | 0.015 | 5.8 | 4 | 0.998 |
| Heparin | D12 | 0.23 | 0.239 | | | | | |
| D (0 h) | E3 | 0.192 | 0.183 | 0.175 | 0.011 | 6.5 | 4 | 0.701 |
| EDTA | E4 | 0.181 | 0.167 | | | | | |
| D (1 h) | E5 | 0.165 | 0.144 | 0.15 | 0.009 | 6.3 | 4 | 0.601 |
| EDTA | E6 | 0.174 | 0.157 | | | | | |
| D (4 h) | E7 | 0.187 | 0.176 | 0.166 | 0.014 | 8.2 | 4 | 0.666 |
| EDTA | E8 | 0.174 | 0.157 | | | | | |
| D (16 h) | E9 | 0.196 | 0.189 | 0.169 | 0.029 | 17.3 | 4 | 0.675 |
| EDTA | E10 | 0.168 | 0.148 | | | | | |
| D (24 h) | E11 | 0.174 | 0.157 | 0.149 | 0.012 | 7.7 | 4 | 0.595 |
| EDTA | E12 | 0.163 | 0.141 | | | | | |
| D (48 h) | F3 | 0.174 | 0.157 | 0.158 | 0.002 | 1.3 | 4 | 0.633 |
| EDTA | F4 | 0.176 | 0.16 | | | | | |
| D (72 h) | F5 | 0.184 | 0.172 | 0.175 | 0.004 | 2.4 | 4 | 0.698 |
| EDTA | F6 | 0.188 | 0.178 | | | | | |
| D (96 h) | F7 | 0.196 | 0.189 | 0.18 | 0.013 | 6.9 | 4 | 0.722 |
| EDTA | F8 | 0.184 | 0.172 | | | | | |
| D (168 h) | F9 | 0.205 | 0.203 | 0.178 | 0.034 | 19.3 | 4 | 0.713 |
| EDTA | F10 | 0.172 | 0.154 | | | | | |
| D (Finger) | F11 | 0.169 | 0.149 | 0.15 | 0.001 | 0.7 | 4 | 0.601 |
| EDTA | F12 | 0.17 | 0.151 | | | | | |
| D (0 h) | G3 | 0.136 | 0.1 | 0.122 | 0.03 | 25 | 4 | 0.488 |
| Heparin | G4 | 0.165 | 0.144 | | | | | |
| D (1 h) | G5 | 0.177 | 0.161 | 0.152 | 0.013 | 8.2 | 4 | 0.61 |
| Heparin | G6 | 0.165 | 0.144 | | | | | |
| D (4 h) | G7 | 0.163 | 0.141 | 0.147 | 0.008 | 5.7 | 4 | 0.586 |
| Heparin | G8 | 0.171 | 0.152 | | | | | |
| D (16 h) | G9 | 0.191 | 0.182 | 0.165 | 0.024 | 14.6 | 4 | 0.66 |
| Heparin | G10 | 0.168 | 0.148 | | | | | |
| D (24 h) | G11 | 0.177 | 0.161 | 0.168 | 0.009 | 5.6 | 4 | 0.672 |
| Heparin | G12 | 0.186 | 0.175 | | | | | |
| D (48 h) | H3 | 0.19 | 0.181 | 0.171 | 0.014 | 7.9 | 4 | 0.684 |
| Heparin | H4 | 0.177 | 0.161 | | | | | |
| D (72 h) | H5 | 0.184 | 0.172 | 0.166 | 0.007 | 4.4 | 4 | 0.666 |
| Heparin | H6 | 0.177 | 0.161 | | | | | |
| D (96 h) | H7 | 0.198 | 0.192 | 0.185 | 0.01 | 5.6 | 4 | 0.74 |
| Heparin | H8 | 0.188 | 0.178 | | | | | |
| D (168 h) | H9 | 0.197 | 0.191 | 0.178 | 0.018 | 9.9 | 4 | 0.713 |
| Heparin | H10 | 0.18 | 0.166 | | | | | |
| D (Finger) | H11 | 0.17 | 0.151 | 0.149 | 0.003 | 2.1 | 4 | 0.595 |
| Heparin | H12 | 0.167 | 0.147 | | | | | |
| Spike (0 h) | A3 | 0.449 | 0.542 | 0.537 | 0.007 | 1.3 | 4 | 2.147 |
| EDTA | A4 | 0.442 | 0.532 | | | | | |
| Spike (1 h) | B3 | 0.438 | 0.526 | 0.52 | 0.009 | 1.7 | 4 | 2.079 |
| EDTA | B4 | 0.429 | 0.513 | | | | | |
| Spike (4 h) | C3 | 0.426 | 0.509 | 0.51 | 0.001 | 0.2 | 4 | 2.039 |
| EDTA | C4 | 0.427 | 0.511 | | | | | |
| Spike (16 h) | D3 | 0.442 | 0.532 | 0.531 | 0.001 | 0.2 | 4 | 2.124 |
| EDTA | D4 | 0.441 | 0.53 | | | | | |
| Spike (24 h) | E3 | 0.471 | 0.573 | 0.56 | 0.018 | 3.2 | 4 | 2.24 |
| EDTA | E4 | 0.453 | 0.547 | | | | | |
| Spike (48 h) | F3 | 0.47 | 0.571 | 0.566 | 0.008 | 1.4 | 4 | 2.263 |
| EDTA | F4 | 0.462 | 0.56 | | | | | |
| Spike (72 h) | G3 | 0.514 | 0.634 | 0.636 | 0.003 | 0.5 | 4 | 2.545 |
| EDTA | G4 | 0.517 | 0.638 | | | | | |
| Spike (96 h) | H3 | 0.558 | 0.697 | 0.683 | 0.019 | 2.8 | 4 | 2.733 |
| EDTA | H4 | 0.539 | 0.67 | | | | | |
| Spike (168 h) | A5 | 0.553 | 0.69 | 0.693 | 0.005 | 0.7 | 4 | 2.773 |
| EDTA | A6 | 0.558 | 0.697 | | | | | |
| Spike (Finger) | B5 | 0.587 | 0.738 | 0.75 | 0.016 | 2.2 | 4 | 3 |
| EDTA | B6 | 0.603 | 0.761 | | | | | |
| Spike (0 h) | C5 | 0.506 | 0.623 | 0.617 | 0.008 | 1.3 | 4 | 2.468 |
| Heparin | C6 | 0.498 | 0.611 | | | | | |
| Spike (1 h) | D5 | 0.514 | 0.634 | 0.637 | 0.004 | 0.6 | 4 | 2.548 |
| Heparin | D6 | 0.518 | 0.64 | | | | | |
| Spike (4 h) | E5 | 0.506 | 0.623 | 0.634 | 0.016 | 2.5 | 4 | 2.536 |
| Heparin | E6 | 0.522 | 0.645 | | | | | |
| Spike (16 h) | F5 | 0.537 | 0.667 | 0.675 | 0.011 | 1.6 | 4 | 2.699 |
| Heparin | F6 | 0.548 | 0.683 | | | | | |
| Spike (24 h) | G5 | 0.54 | 0.671 | 0.669 | 0.003 | 0.5 | 4 | 2.676 |
| Heparin | G6 | 0.537 | 0.667 | | | | | |
| Spike (48 h) | H5 | 0.564 | 0.705 | 0.71 | 0.006 | 0.9 | 4 | 2.839 |
| Heparin | H6 | 0.57 | 0.714 | | | | | |
| Spike (72 h) | A7 | 0.51 | 0.628 | 0.625 | 0.004 | 0.6 | 4 | 2.502 |
| Heparin | A8 | 0.506 | 0.623 | | | | | |
| Spike (96 h) | B7 | 0.501 | 0.616 | 0.621 | 0.008 | 1.3 | 4 | 2.485 |
| Heparin | B8 | 0.509 | 0.627 | | | | | |
| Spike (168 h) | C7 | 0.481 | 0.587 | 0.603 | 0.022 | 3.7 | 4 | 2.411 |
| Heparin | C8 | 0.503 | 0.618 | | | | | |
| Spike (Finger) | D7 | 0.568 | 0.711 | 0.68 | 0.044 | 6.5 | 4 | 2.719 |
| Heparin | D8 | 0.524 | 0.648 | | | | | |

[0209] FIG. 12 illustrates Klotho level at different incubation time at RT.

[0210] Table 22, below presents average Klotho protein level (ng/mL) in plasma:

TABLE 22

| Blood sample | |
|---|---|
| Venous | Capillary (finger) |

| Anticoagulant | EDIA | Heparin | EDIA | Heparin |
|---|---|---|---|---|
| A | 1.06 | 1.07 | 1.28 | 1.11 |
| B | 0.63 | 0.66 | 0.75 | 0.72 |
| C | 1.03 | 1.08 | 1.01 | 1.00 |
| D | 0.67 | 0.65 | 0.60 | 0.60 |
| A, Spiked | 2.33 | 2.57 | 3.00 | 2.72 |

[0211] Table 23, below presents spiked Klotho recovery rate (%)

TABLE 23

| Blood sample | |
|---|---|
| Venous | Capillary (finger) |

| Anticoagulant | EDIA | Heparin | EDIA | Heparin |
|---|---|---|---|---|
| A, Spiked | 84% | 100% | 115% | 107% |

### Klotho Stability Testing at Various Temperatures Emulating Shipping Stress

[0212] Phlebotomist(s) collected >12 mL blood (sample) from each of four donors into heparinized blood tubes. Technician(s) immediately dispensed 300-400 uL of blood from the collected sample of each donor into separate heparinized Micro Tubes (from BD). Tubes were stored and processed according to the study design (see table below). Blood was processed at each timepoint or centrifuged and stored (plasma) at −80° C. All samples were tested at approximately day 17.

[0213] For the study, 120 data points were collected, representing 6 conditions, over 14 days (see below).

TABLE 24

| | Donor 1 | | | | | Donor 2 | | | | |
|---|---|---|---|---|---|---|---|---|---|---|
| | 0 | 4 | 7 | 9 | 14 | 0 | 4 | 7 | 9 | 14 |
| Temperature Group | Hr | Day | Day | Day | Day | Hr | Day | Day | Day | Day |
| 20° C. the enire time | X | X | X | X | X | X | X | X | X | X |
| 8 hrs @ 0 C., 20° C. | X | X | X | X | X | X | X | X | X | X |
| remaining time | | | | | | | | | | |
| 24 hrs @ 0 C., 20° C. | X | X | X | X | X | X | X | X | X | X |
| remaining time | | | | | | | | | | |
| 8 hrs @−150 C., 20° C. | X | X | X | X | X | X | X | X | X | X |
| remaining time | | | | | | | | | | |
| 24 hrs @−15 C., 20° C. | X | X | X | X | X | X | X | X | X | X |
| remaining time | | | | | | | | | | |
| 8 hrs @37 C., 20° C. | X | X | X | X | X | X | X | X | X | X |
| remaining time | | | | | | | | | | |
| 24 hrs @37 C., 20° C. | X | X | X | X | X | X | X | X | X | X |
| remaining time | | | | | | | | | | |
| | Donor 3 | | | | | Donor 4 | | | | |
| | 0 | 4 | 7 | 9 | 14 | 0 | 4 | 7 | 9 | 14 |
| Temperature Group | Hr | Day | Day | Day | Day | Hr | Day | Day | Day | Day |
| 20° C. the enire time | X | X | X | X | X | X | X | X | X | X |
| 8 hrs @ 0 C., 20° C. | X | X | X | X | X | X | X | X | X | X |
| remaining time | | | | | | | | | | |
| 24 hrs @ 0 C., 20° C. | X | X | X | X | X | X | X | X | X | X |
| remaining time | | | | | | | | | | |
| 8 hrs @−150 C., 20° C. | X | X | X | X | X | X | X | X | X | X |
| remaining time | | | | | | | | | | |
| 24 hrs @−15 C., 20° C. | X | X | X | X | X | X | X | X | X | X |
| remaining time | | | | | | | | | | |
| 8 hrs @37 C., 20° C. | X | X | X | X | X | X | X | X | X | X |
| remaining time | | | | | | | | | | |
| 24 hrs @37 C., 20° C. | X | X | X | X | X | X | X | X | X | X |
| remaining time | | | | | | | | | | |

[0214] The plate layout (see Table 25) was the same for all four donors (see Tables 26-29, below).

TABLE 25

| | | | | | |
|---|---|---|---|---|---|
| A | STD, 6 ng/mL | O h | @−15 C., 8 hr, Day 7 | @−0 C., 24 hr, Day 4 | @37 C., 8 hr, Day 9 |
| B | STD, 3 ng/mL | @RT Day 4 | @−15 C., 8 hr, Day 9 | @−0 C., 24 hr, Day 5 | @37 C., 8 hr, Day 14 |
| C | STD, 1.5 ng/mL | @RT Day 5 | @−15 C., 8 hr, Day 14 | @−0 C., 24 hr, Day 7 | @37 C., 24 hr, Day 4 |
| D | STD, 0.75 ng/mL | @RT day 7 | @0 C., 8 hr, Day 4 | @−0 C., 24 hr, Day 9 | @37 C., 24 hr, Day 5 |
| E | STD, 0.375 ng/mL | @RT Day 9 | @0 C., 8 hr, Day 5 | @−0 C., 24 hr, Day 14 | @37 C., 24 hr, Day 7 |
| F | STD, 0.188 ng/mL | @RT day 14 | @0 C., 8 hr, Day 7 | @37 C., 8 hr, Day 4 | @37 C., 24 hr, Day 9 |
| G | STD, 0.094 ng/mL | @−15 C., 8 hr, Day 4 | @−0 C., 8 hr, Day 9 | @37 C., 8 hr, Day 5 | @37 C., 24 hr, Day 14 |
| H | STD, 0 ng/mL | @−15 C., 8 hr, Day 5 | @−0 C., 8 hr, Day 14 | @37 C., 8 hr, Day 6 | |

[0215] ELISA protocol was conducted according to instructions of soluble Klotho ELISA kit (human), IBL, Cat# 27998). Raw data are given below in Tables 26-29:
[0216] Plate 1, Donor 1:

TABLE 26

| | | | | | | | | | | |
|---|---|---|---|---|---|---|---|---|---|---|
| 2.689 | 2.577 | 0.138 | 0.141 | 0.09 | 0.088 | 0.133 | 0.125 | 0.107 | 0.109 | 0.047 |
| 1.481 | 1.423 | 0.174 | 0.162 | 0.107 | 0.177 | 0.169 | 0.161 | 0.142 | 0.159 | 0.053 |
| 0.801 | 0.833 | 0.128 | 0.131 | 0.081 | 0.085 | 0.125 | 0.124 | 0.114 | 0.11 | 0.128 |
| 0.443 | 0.414 | 0.129 | 0.123 | 0.123 | 0.126 | 0.121 | 0.12 | 0.111 | 0.111 | 0.065 |
| 0.26 | 0.253 | 0.111 | 0.128 | 0.132 | 0.129 | 0.116 | 0.118 | 0.111 | 0.115 | 0.06 |
| 0.162 | 0.154 | 0.109 | 0.116 | 0.128 | 0.131 | 0.135 | 0.127 | 0.113 | 0.111 | 0.062 |
| 0.15 | 0.114 | 0.087 | 0.092 | 0.126 | 0.131 | 0.137 | 0.137 | 0.099 | 0.124 | 0.062 |
| 0.148 | 0.058 | 0.219 | 0.098 | 0.115 | 0.277 | 0.243 | 0.128 | 0.052 | 0.056 | 0.087 |

[0217] Plate 2, Donor 2:

TABLE 27

| | | | | | | | | | | |
|---|---|---|---|---|---|---|---|---|---|---|
| 2.799 | 2.887 | 0.218 | 0.223 | 0.124 | 0.122 | 0.217 | 0.201 | 0.174 | 0.167 | 0.088 |
| 1.594 | 1.596 | 0.222 | 0.218 | 0.112 | 0.105 | 0.208 | 0.208 | 0.161 | 0.153 | 0.092 |
| 0.91 | 0.898 | 0.223 | 0.219 | 0.108 | 0.109 | 0.202 | 0.202 | 0.172 | 0.168 | 0.154 |
| 0.49 | 0.475 | 0.207 | 0.21 | 0.208 | 0.201 | 0.199 | 0.203 | 0.17 | 0.175 | 0.067 |
| 0.288 | 0.284 | 0.217 | 0.212 | 0.21 | 0.208 | 0.162 | 0.165 | 0.163 | 0.167 | 0.086 |
| 0.175 | 0.162 | 0.174 | 0.173 | 0.203 | 0.201 | 0.203 | 0.202 | 0.161 | 0.157 | 0.105 |
| 0.114 | 0.114 | 0.116 | 0.11 | 0.208 | 0.206 | 0.211 | 0.219 | 0.173 | 0.147 | 0.486 |
| 0.08 | 0.064 | 0.175 | 0.123 | 0.175 | 0.186 | 0.237 | 0.203 | 0.058 | 0.051 | 0.082 |

[0218] Plate 3, Donor 3:

TABLE 28

| | | | | | | | | | | |
|---|---|---|---|---|---|---|---|---|---|---|
| 2.768 | 2.8 | 0.155 | 0.156 | 0.108 | 0.102 | 0.161 | 0.159 | 0.14 | 0.137 | 0.132 |
| 1.629 | 1.642 | 0.161 | 0.158 | 0.1 | 0.093 | 0.156 | 0.16 | 0.131 | 0.13 | 0.057 |
| 0.926 | 0.911 | 0.159 | 0.159 | 0.099 | 0.105 | 0.15 | 0.152 | 0.139 | 0.145 | 0.053 |
| 0.51 | 0.484 | 0.15 | 0.151 | 0.15 | 0.146 | 0.154 | 0.149 | 0.137 | 0.138 | 0.057 |
| 0.288 | 0.284 | 0.16 | 0.152 | 0.156 | 0.157 | 0.132 | 0.133 | 0.134 | 0.134 | 0.111 |
| 0.188 | 0.165 | 0.131 | 0.136 | 0.151 | 0.152 | 0.15 | 0.152 | 0.133 | 0.129 | 0.068 |
| 0.119 | 0.121 | 0.114 | 0.115 | 0.154 | 0.156 | 0.164 | 0.164 | 0.122 | 0.123 | 0.066 |
| 0.092 | 0.071 | 0.158 | 0.113 | 0.149 | 0.155 | 0.17 | 0.164 | 0.059 | 0.061 | 0.078 |

[0219] Plate 4, Donor 4:

TABLE 29

| | | | | | | | | | | |
|---|---|---|---|---|---|---|---|---|---|---|
| 2.787 | 2.699 | 0.177 | 0.207 | 0.137 | 0.128 | 0.196 | 0.185 | 0.144 | 0.14 | 0.132 |
| 1.614 | 1.622 | 0.199 | 0.186 | 0.112 | 0.104 | 0.18 | 0.178 | 0.139 | 0.133 | 0.057 |
| 0.911 | 0.884 | 0.199 | 0.187 | 0.109 | 0.104 | 0.168 | 0.17 | 0.139 | 0.135 | 0.053 |
| 0.494 | 0.475 | 0.177 | 0.173 | 0.182 | 0.178 | 0.166 | 0.168 | 0.147 | 0.148 | 0.058 |
| 0.302 | 0.287 | 0.164 | 0.17 | 0.19 | 0.188 | 0.15 | 0.156 | 0.14 | 0.137 | 0.111 |
| 0.179 | 0.175 | 0.164 | 0.169 | 0.183 | 0.179 | 0.187 | 0.191 | 0.144 | 0.14 | 0.068 |
| 0.122 | 0.122 | 0.125 | 0.122 | 0.171 | 0.164 | 0.174 | 0.172 | 0.133 | 0.133 | 0.067 |
| 0.083 | 0.062 | 0.165 | 0.128 | 0.165 | 0.162 | 0.176 | 0.173 | 0.049 | 0.048 | 0.079 |

[0220] Data analysis is given below in Tables 30-41:
[0221] Plate 1, Donor 1:
[0222] Standard Calculations

TABLE 30

| Sam- | Concen- | | | Val- | MeanVal- | Std. | CV |
|---|---|---|---|---|---|---|---|
| ple | tration | Wells | BackConcCalc | ues | ue | Dev. | % |
| St01 | 6 | A1 | 5.965 | 2.611 | 2.555 | 0.079 | 3.1 |
| | | A2 | 5.7 | 2.499 | | | |
| St02 | 3 | B1 | 3.133 | 1.403 | 1.374 | 0.041 | 3 |
| | | B2 | 2.998 | 1.345 | | | |
| St03 | 1.5 | C1 | 1.575 | 0.723 | 0.739 | 0.023 | 3.1 |
| | | C2 | 1.647 | 0.755 | | | |
| St04 | 0.75 | D1 | 0.775 | 0.365 | 0.35 | 0.021 | 5.9 |
| | | D2 | 0.711 | 0.336 | | | |
| St05 | 0.375 | E1 | 0.376 | 0.182 | 0.178 | 0.005 | 2.8 |
| | | E2 | 0.361 | 0.175 | | | |
| St06 | 0.188 | F1 | 0.168 | 0.084 | 0.08 | 0.006 | 7.1 |
| | | F2 | 0.151 | 0.076 | | | |
| St07 | 0.094 | G1 | 0.143 | 0.072 | 0.054 | 0.025 | 47.6 |
| | | G2 | 0.069 | 0.036 | | | |

[0223] Sample Calculations

TABLE 31

| | | | | | | | | | Difference |
|---|---|---|---|---|---|---|---|---|---|
| Sample | Wells | Values | Result | MeanResult | Std. Dev. | CV % | Dilution | Adj. Result | to 0 h |
| 0 h | A3 | 0.06 | 0.118 | 0.121 | 0.004 | 3.6 | 4 | 0.486 | 1.00 |
| | A4 | 0.063 | 0.124 | | | | | | |
| RT Day 4 | B3 | 0.096 | 0.193 | 0.181 | 0.018 | 9.8 | 4 | 0.723 | 1.49 |
| | B4 | 0.084 | 0.168 | | | | | | |
| RT Day 5 | C3 | 0.05 | 0.098 | 0.101 | 0.004 | 4.3 | 4 | 0.403 | 0.83 |
| | C4 | 0.053 | 0.104 | | | | | | |
| RT Day 7 | D3 | 0.051 | 0.1 | 0.094 | 0.009 | 9.3 | 4 | 0.375 | 0.77 |
| | D4 | 0.045 | 0.088 | | | | | | |
| RT Day 9 | E3 | 0.033 | 0.063 | 0.08 | 0.024 | 30.4 | 4 | 0.322 | 0.66 |
| | E4 | 0.05 | 0.098 | | | | | | |
| RT Day 14 | F3 | 0.031 | 0.059 | 0.066 | 0.01 | 15.1 | 4 | 0.265 | 0.55 |
| | F4 | 0.038 | 0.073 | | | | | | |
| −15 C., 8 hr | G3 | 0.009 | 0.016 | 0.021 | 0.007 | 33.3 | 4 | 0.082 | 0.17 |
| Day 4 | G4 | 0.014 | 0.025 | | | | | | |
| −15 C., 8 hr | H3 | 0.141 | 0.288 | 0.163 | 0.178 | 109.1 | 4 | 0.651 | 1.34 |
| Day 5 | H4 | 0.02 | 0.037 | | | | | | |
| −15 C., 8 hr | A5 | 0.012 | 0.022 | 0.02 | 0.003 | 14 | 4 | 0.078 | 0.16 |
| Day 7 | A6 | 0.01 | 0.018 | | | | | | |
| −15 C., 8 hr | B5 | 0.029 | 0.055 | 0.127 | 0.102 | 80.2 | 4 | 0.509 | 1.05 |
| Day 9 | B6 | 0.099 | 0.2 | | | | | | |
| −15 C., 8 hr | C5 | 0.003 | 0.004 | 0.008 | 0.005 | 64.8 | 4 | 0.033 | 0.07 |
| Day 14 | C6 | 0.007 | 0.012 | | | | | | |
| 0 C., 8 hr, | D5 | 0.045 | 0.088 | 0.091 | 0.004 | 4.8 | 4 | 0.362 | 0.74 |
| Day 4 | D6 | 0.048 | 0.094 | | | | | | |
| 0 C., 8 hr, | E5 | 0.054 | 0.106 | 0.103 | 0.004 | 4.2 | 4 | 0.412 | 0.85 |
| Day 5 | E6 | 0.051 | 0.1 | | | | | | |
| 0 C., 8 hr, | F5 | 0.05 | 0.098 | 0.101 | 0.004 | 4.3 | 4 | 0.403 | 0.83 |
| Day 7 | F6 | 0.053 | 0.104 | | | | | | |
| 0 C., 8 hr, | G5 | 0.048 | 0.094 | 0.099 | 0.007 | 7.3 | 4 | 0.395 | 0.81 |
| Day 9 | G6 | 0.053 | 0.104 | | | | | | |
| 0 C., 8 hr, | H5 | 0.037 | 0.071 | 0.242 | 0.241 | 99.8 | 4 | 0.968 | 1.99 |
| Day 14 | H6 | 0.199 | 0.413 | | | | | | |
| 0 C., 24 hr, | A7 | 0.055 | 0.108 | 0.1 | 0.012 | 11.6 | 4 | 0.399 | 0.82 |
| Day 4 | A8 | 0.047 | 0.092 | | | | | | |
| 0 C., 24 hr, | B7 | 0.0914 | 0.183 | 0.174 | 0.012 | 6.8 | 4 | 0.698 | 1.44 |
| Day 5 | B8 | 0.083 | 0.166 | | | | | | |
| 0 C., 24 hr, | C7 | 0.047 | 0.092 | 0.091 | 0.001 | 1.6 | 4 | 0.362 | 0.74 |
| Day 7 | C8 | 0.046 | 0.09 | | | | | | |
| 0 C., 24 hr, | D7 | 0.043 | 0.083 | 0.082 | 0.001 | 1.7 | 4 | 0.33 | 0.68 |
| Day 9 | D8 | 0.042 | 0.081 | | | | | | |
| 0 C., 24 hr, | E7 | 0.038 | 0.073 | 0.075 | 0.003 | 3.8 | 4 | 0.301 | 0.62 |
| Day 14 | E8 | 0.04 | 0.077 | | | | | | |
| 37 C., 8 hr, | F7 | 0.057 | 0.112 | 0.104 | 0.012 | 11.2 | 4 | 0.416 | 0.86 |
| Day 4 | F8 | 0.049 | 0.096 | | | | | | |
| 37 C., 8 hr, | G7 | 0.059 | 0.116 | 0.116 | 0 | 0 | 4 | 0.465 | 0.96 |
| Day 5 | G8 | 0.059 | 0.116 | | | | | | |
| 37 C., 8 hr, | H7 | 0.165 | 0.34 | 0.219 | 0.171 | 78.2 | 4 | 0.875 | 1.80 |
| Day 7 | H8 | 0.05 | 0.098 | | | | | | |
| 37 C., 8 hr, | A9 | 0.029 | 0.055 | 0.057 | 0.003 | 5 | 4 | 0.229 | 0.47 |
| Day 9 | A10 | 0.031 | 0.059 | | | | | | |
| 37 C., 8 hr, | B9 | 0.064 | 0.127 | 0.144 | 0.025 | 17.3 | 4 | 0.577 | 1.19 |
| Day 14 | B10 | 0.081 | 0.162 | | | | | | |
| 37 C., 24 hr, | C9 | 0.036 | 0.069 | 0.065 | 0.006 | 8.8 | 4 | 0.261 | 0.54 |
| Day 4 | C10 | 0.032 | 0.061 | | | | | | |
| 37 C., 24 hr, | D9 | 0.033 | 0.063 | 0.063 | 0 | 0 | 4 | 0.253 | 0.52 |
| Day 5 | D10 | 0.033 | 0.063 | | | | | | |
| 37 C., 24 hr, | E9 | 0.033 | 0.063 | 0.067 | 0.006 | 8.5 | 4 | 0.269 | 0.55 |
| Day 7 | E10 | 0.037 | 0.071 | | | | | | |
| 37 C., 24 hr, | F9 | 0.035 | 0.067 | 0.065 | 0.003 | 4.4 | 4 | 0.261 | 0.54 |
| Day 9 | F10 | 0.033 | 0.063 | | | | | | |
| 37 C., 24 hr, | G9 | 0.021 | 0.039 | 0.064 | 0.036 | 55.3 | 4 | 0.258 | 0.53 |
| Day 14 | G10 | 0.046 | 0.09 | | | | | | |

[0224] Klotho Concentration Changes in Time Course

TABLE 32

| | Room | −15° C. | 0° C. | 0° C. | 37° C. | 37° C. |
|---|---|---|---|---|---|---|
| | Temp | 8 hr | 8 hr | 24 hr | 8 hr | 24 hr |
| Day 4 | 149% | 17% | 74% | 82% | 86% | 54% |
| Day 5 | 83% | 134% | 85% | 144% | 96% | 52% |
| Day 7 | 77% | 16% | 83% | 74% | 180% | 55% |
| Day 9 | 66% | 105% | 81% | 68% | 47% | 54% |
| Day 14 | 55% | 7% | 199% | 62% | 119% | 53% |

[0225] Plate 2, Donor 2:
[0226] Standard Calculations

TABLE 33

| Sam- | Concen- | | | Val- | MeanVal- | Std. | CV |
|---|---|---|---|---|---|---|---|
| ple | tration | Wells | BackConcCalc | ues | ue | Dev. | % |
| St01 | 6 | A1 | 5.451 | 2.736 | 2.78 | 0.062 | 2.2 |
| | | A2 | 5.633 | 2.824 | | | |
| St02 | 3 | B1 | 2.983 | 1.531 | 1.532 | 0.001 | 0.1 |
| | | B2 | 2.987 | 1.533 | | | |
| St03 | 1.5 | C1 | 1.613 | 0.847 | 0.841 | 0.008 | 1 |
| | | C2 | 1.589 | 0.835 | | | |
| St04 | 0.75 | D1 | 0.792 | 0.427 | 0.419 | 0.011 | 2.5 |
| | | D2 | 0.763 | 0.412 | | | |
| St05 | 0.375 | E1 | 0.407 | 0.225 | 0.223 | 0.003 | 1.3 |
| | | E2 | 0.399 | 0.221 | | | |
| St06 | 0.188 | F1 | 0.197 | 0.112 | 0.105 | 0.009 | 8.7 |
| | | F2 | 0.173 | 0.099 | | | |
| St07 | 0.094 | G1 | 0.087 | 0.051 | 0.051 | 0 | 0 |
| | | G2 | 0.087 | 0.051 | | | |

[0227] Sample Calculations

TABLE 34

| | | | | | | | | | Difference |
|---|---|---|---|---|---|---|---|---|---|
| Sample | Wells | Values | Result | MeanResult | Std. Dev. | CV % | Dilution | Adj. Result | to 0 h |
| 0 h | A3 | 0.155 | 0.278 | 0.281 | 0.007 | 2.3 | 4 | 1.124 | 1.00 |
| | A4 | 0.16 | 0.286 | | | | | | |
| RT Day 4 | B3 | 0.159 | 0.284 | 0.28 | 0.005 | 1.9 | 4 | 1.12 | 1.00 |
| | B4 | 0.155 | 276 | | | | | | |
| RT Day 5 | C3 | 0.16 | 0.286 | 0.282 | 0.005 | 1.9 | 4 | 1.127 | 1.00 |
| | C4 | 0.156 | 0.278 | | | | | | |
| RT Day 7 | D3 | 0.144 | 2256 | 0.259 | 0.004 | 1.5 | 4 | 1.035 | 0.92 |
| | D4 | 0.147 | 0.261 | | | | | | |
| RT Day 9 | E3 | 0.154 | 0.274 | 0.27 | 0.007 | 2.4 | 4 | 1.079 | 0.96 |
| | E4 | 0.149 | 0.265 | | | | | | |
| RT Day 14 | F3 | 0.111 | 0.195 | 0.194 | 0.001 | 0.7 | 4 | 0.777 | 0.69 |
| | F4 | 0.11 | 0.193 | | | | | | |
| −15 C., 8 hr | G3 | 0.053 | 0.09 | 0.085 | 0.008 | 8.9 | 4 | 0.34 | 0.3 |
| Day 4 | G4 | 0.047 | 0.08 | | | | | | |
| −15 C., 8 hr | H3 | 0.112 | 0.197 | 0.15 | 0.067 | 44.4 | 4 | 0.6 | 0.53 |
| Day 5 | H4 | 0.06 | 0.103 | | | | | | |
| −15 C., 8 hr | A5 | 0.061 | 0.105 | 0.103 | 0.003 | 2.5 | 4 | 0.411 | 0.37 |
| Day 7 | A6 | 0.059 | 0.101 | | | | | | |
| −15 C., 8 hr | B5 | 0.049 | 0.083 | 0.077 | 0.009 | 11.4 | 4 | 0.308 | 0.27 |
| Day 9 | B6 | 0.042 | 0.071 | | | | | | |
| −15 C., 8 hr | C5 | 0.045 | 0.076 | 0.077 | 0.001 | 1.6 | 4 | 0.308 | 0.27 |
| Day 14 | C6 | 0.046 | 0.078 | | | | | | |
| 0 C., 8 hr, | D5 | 0.145 | 0.258 | 0.251 | 0.009 | 3.6 | 4 | 1.005 | 0.89 |
| Day 4 | D6 | 0.138 | 0.245 | | | | | | |
| 0 C., 8 hr, | E5 | 0.147 | 0.261 | 0.26 | 0.003 | 1 | 4 | 1.038 | 0.92 |
| Day 5 | E6 | 0.145 | 0.258 | | | | | | |
| 0 C., 8 hr, | F5 | 0.14 | 0.249 | 0.247 | 0.003 | 1.1 | 4 | 0.987 | 0.88 |
| Day 7 | F6 | 0.138 | 0.245 | | | | | | |
| 0 C., 8 hr, | G5 | 0.145 | 0.258 | 0.256 | 0.003 | 1 | 4 | 1.024 | 0.91 |
| Day 9 | G6 | 0.143 | 0.254 | | | | | | |
| 0 C., 8 hr, | H5 | 0.112 | 0.197 | 0.207 | 0.014 | 6.9 | 4 | 0.828 | 0.74 |
| Day 14 | H6 | 0.123 | 0.217 | | | | | | |
| 0 C., 24 hr, | A7 | 0.154 | 0.274 | 0.26 | 0.021 | 8.1 | 4 | 1.038 | 0.92 |
| Day 4 | A8 | 0.138 | 0.245 | | | | | | |
| 0 C., 24 hr, | B7 | 0.145 | 0.258 | 0.258 | 0 | 0 | 4 | 1.031 | 0.92 |
| Day 5 | B8 | 0.145 | 0.258 | | | | | | |
| 0 C., 24 hr, | C7 | 0.139 | 0.247 | 0.247 | 0 | 0 | 4 | 0.987 | 0.88 |
| Day 7 | C8 | 0.139 | 0.247 | | | | | | |
| 0 C., 24 hr, | D7 | 0.136 | 0.241 | 0.245 | 0.005 | 2.1 | 4 | 0.979 | 0.87 |
| Day 9 | D8 | 0.14 | 0.249 | | | | | | |
| 0 C., 24 hr, | E7 | 0.099 | 0.173 | 0.176 | 0.004 | 202 | 4 | 0.704 | 0.63 |
| Day 14 | E8 | 0.102 | 0.179 | | | | | | |
| 37 C., 8 hr, | F7 | 0.14 | 0.249 | 0.0248 | 0.001 | 0.5 | 4 | 0.99 | 0.88 |
| Day 4 | F8 | 0.139 | 0.247 | | | | | | |
| 37 C., 8 hr, | G7 | 0.148 | 0.263 | 0.271 | 0.01 | 3.9 | 4 | 1.083 | 0.96 |
| Day 5 | G8 | 0.156 | 0.278 | | | | | | |
| 37 C., 8 hr, | H7 | 0.174 | 0.312 | 0.28 | 0.045 | 15.9 | 4 | 1.12 | 1.00 |
| Day 7 | H8 | 0.014 | 0.249 | | | | | | |
| 37 C., 8 hr, | A9 | 0.111 | 0.195 | 0.159 | 0.009 | 4.8 | 4 | 0.755 | 0.67 |
| Day 9 | A10 | 0.104 | 0.182 | | | | | | |
| 37 C., 8 hr, | B9 | 0.098 | 0.171 | 0.164 | 0.01 | 6.3 | 4 | 0.657 | 0.58 |
| Day 14 | B10 | 0.09 | 0.157 | | | | | | |
| 37 C., 24 hr, | C9 | 0.109 | 0.192 | 0.188 | 0.005 | 2.8 | 4 | 0.752 | 0.67 |
| Day 4 | C10 | 0.105 | 0.187 | | | | | | |
| 37 C., 24 hr, | D9 | 0.107 | 0.188 | 0.192 | 0.006 | 3.4 | 4 | 0.77 | 0.69 |
| Day 5 | D10 | 0.112 | 0.197 | | | | | | |
| 37 C., 24 hr, | E9 | 0.1 | 0.175 | 0.179 | 0.005 | 2.9 | 4 | 0.715 | 0.64 |
| Day 7 | E10 | 0.104 | 0.182 | | | | | | |
| 37 C., 24 hr, | F9 | 0.098 | 0.171 | 0.168 | 0.005 | 3.1 | 4 | 0.671 | 0.6 |
| Day 9 | F10 | 0.094 | 0.164 | | | | | | |
| 37 C., 24 hr, | G9 | 0.11 | 0.193 | 0.17 | 0.033 | 19.7 | 4 | 0.679 | 0.6 |
| Day 14 | G10 | 0.084 | 0.146 | | | | | | |

[0228] Klotho Concentration Changes in Time Course

TABLE 35

| | Room | −15° C. | 0° C. | 0° C. | 37° C. | 37° C. |
|---|---|---|---|---|---|---|
| | Temp | 8 hr | 8 hr | 24 hr | 8 hr | 24 hr |
| Day 4 | 100% | 30% | 89% | 92% | 88% | 67% |
| Day 5 | 100% | 53% | 92% | 92% | 96% | 69% |
| Day 7 | 92% | 37% | 88% | 88% | 100% | 64% |
| Day 9 | 96% | 27% | 91% | 87% | 67% | 60% |
| Day 14 | 69% | 27% | 74% | 63% | 58% | 60% |

[0229] Plate 3, Donor 3:
[0230] Standard Calculations

TABLE 36

| Sam- | Concen- | | | Val- | MeanVal- | Std. | CV |
|---|---|---|---|---|---|---|---|
| ple | tration | Wells | BackConcCalc | ues | ue | Dev. | % |
| St01 | 6 | A1 | 6.24 | 2.768 | 2.784 | 0.023 | 0.8 |
| | | A2 | 6.333 | 2.8 | | | |
| St02 | 3 | B1 | 3.15 | 1.629 | 1.636 | 0.009 | 0.6 |
| | | B2 | 3.182 | 1.642 | | | |
| St03 | 1.5 | C1 | 1.52 | 0.926 | 0.919 | 0.011 | 1.2 |
| | | C2 | 1.489 | 0.911 | | | |
| St04 | 0.75 | D1 | 0.705 | 0.51 | 0.497 | 0.018 | 3.7 |
| | | D2 | 0.659 | 0.484 | | | |
| St05 | 0.375 | E1 | 0.337 | 0.288 | 0.286 | 0.003 | 1 |
| | | E2 | 0.331 | 0.284 | | | |
| St06 | 0.188 | F1 | 0.195 | 0.188 | 0.177 | 0.016 | 9.2 |
| | | F2 | 0.164 | 0.165 | | | |
| St07 | 0.094 | G1 | 0.108 | 0.119 | 0.12 | 0.001 | 1.2 |
| | | G2 | 0.11 | 0.121 | | | |

[0231] Sample Calculations

TABLE 37

| | | | | | | | | | Difference |
|---|---|---|---|---|---|---|---|---|---|
| Sample | Wells | Values | Result | MeanResult | Std. Dev. | CV % | Dilution | Adj. Result | to 0 h |
| 0 h | A3 | 0.155 | 0.152 | 0.152 | 0.001 | 0.6 | 4 | 0.609 | 1.00 |
| | A4 | 0.156 | 0.153 | | | | | | |
| RT | B3 | 0.161 | 0.159 | 0.157 | 0.003 | 1.7 | 4 | 0.63 | 1.03 |
| Day 4 | B4 | 0.158 | 0.156 | | | | | | |
| RT | C3 | 0.159 | 0.157 | 0.157 | 0 | 0 | 4 | 0.627 | 1.03 |
| Day 5 | C4 | 0.159 | 0.157 | | | | | | |
| RT | D3 | 0.15 | 0.145 | 0.146 | 0.001 | 0.6 | 4 | 0.584 | 0.96 |
| Day 7 | D4 | 0.151 | 0.147 | | | | | | |
| RT | E3 | 0.16 | 0.158 | 0.159 | 0.002 | 1.1 | 4 | 0.637 | 1.05 |
| Day 9 | E4 | 0.162 | 0.161 | | | | | | |
| RT | F3 | 0.131 | 0.122 | 0.125 | 0.004 | 3.4 | 4 | 0.501 | 0.82 |
| Day 14 | F4 | 0.136 | 0.128 | | | | | | |
| −15 C., | G3 | 0.114 | 0.102 | 0.103 | 0.001 | 0.8 | 4 | 0.411 | 0.67 |
| 8 hr | G4 | 0.115 | 0.103 | | | | | | |
| Day 4 | | | | | | | | | |
| −15 C., | H3 | 0.158 | 0.156 | 0.128 | 0.039 | 30.1 | 4 | 0.513 | 0.84 |
| 8 hr | H4 | 0.113 | 0.101 | | | | | | |
| Day 5 | | | | | | | | | |
| −15 C., | A5 | 0.108 | 0.095 | 0.092 | 0.005 | 5.2 | 4 | 0.367 | 0.60 |
| 8 hr | A6 | 0.102 | 0.08 | | | | | | |
| Day 7 | | | | | | | | | |
| −15 C., | B5 | 0.1 | 0.086 | 0.082 | 0.005 | 6.6 | 4 | 0.329 | |
| 8 hr | B6 | 0.093 | 0.079 | | | | | | 0.54 |
| Day 9 | | | | | | | | | |
| −15 C., | C5 | 0.099 | 0.085 | 0.088 | 0.005 | 5.4 | 4 | 0.354 | |
| 8 hr | C6 | 0.105 | 0.092 | | | | | | 0.58 |
| Day 14 | | | | | | | | | |
| 0 C., | D5 | 0.15 | 0.145 | 0.143 | 0.004 | 2.5 | 4 | 0.572 | |
| 8 hr, | D6 | 0.146 | 0.14 | | | | | | 0.94 |
| Day 4 | | | | | | | | | |
| 0 C., | E5 | 0.156 | 0.153 | 0.154 | 0.001 | 0.6 | 4 | 0.614 | |
| 8 hr, | E6 | 0.157 | 0.154 | | | | | | |
| Day 5 | | | | | | | | | |
| 0 C., | F5 | 0.151 | 0.147 | 0.147 | 0.001 | 0.6 | 4 | 0.589 | |
| 8 hr, | F6 | 0.152 | 0.148 | | | | | | 0.97 |
| Day 7 | | | | | | | | | |
| 0 C., | G5 | 0.154 | 0.15 | 0.152 | 0.002 | 1.2 | 4 | 0.607 | |
| 8 hr, | G6 | 0.156 | 0.153 | | | | | | 1.00 |
| Day 9 | | | | | | | | | |
| 0 C., | H5 | 0.149 | 0.144 | 0.148 | 0.005 | 3.6 | 4 | 0.592 | |
| 8 hr, | H6 | 0.155 | 0.152 | | | | | | 0.97 |
| Day 14 | | | | | | | | | |
| 0 C., | A7 | 0.161 | 0.159 | 0.158 | 0.002 | 1.1 | 4 | 0.632 | |
| 24 hr, | A8 | 0.159 | 0.157 | | | | | | 1.04 |
| Day 4 | | | | | | | | | |
| 0 C., | B7 | 0.156 | 0.153 | 0.156 | 0.004 | 2.3 | 4 | 0.622 | |
| 24 hr, | B8 | 0.16 | 0.158 | | | | | | 1.02 |
| Day 5 | | | | | | | | | |
| 0 C., | C7 | 0.15 | 0.145 | 0.147 | 0.002 | 1.2 | 4 | 0.587 | |
| 24 hr, | C8 | 0.152 | 0.148 | | | | | | 0.96 |
| Day 7 | | | | | | | | | |
| 0 C., | D7 | 0.154 | 0.15 | 0.147 | 0.004 | 3 | 4 | 0.589 | |
| 24 hr, | D8 | 0.149 | 0.144 | | | | | | 0.97 |
| Day 9 | | | | | | | | | |
| 0 C., | E7 | 0.132 | 0.123 | 0.124 | 0.001 | 0.7 | 4 | 0.496 | |
| 24 hr, | E8 | 0.113 | 0.125 | | | | | | 0.81 |
| Day 14 | | | | | | | | | |
| 37 C., | F7 | 0.15 | 0.145 | 0.147 | 0.002 | 1.2 | 4 | 0.587 | |
| 8 hr, | F8 | 0.152 | 0.148 | | | | | | 0.96 |
| Day 4 | | | | | | | | | |
| 37 C., | G7 | 0.164 | 0.163 | 0.163 | 0 | 0 | 4 | 0.653 | |
| 8 hr, | G8 | 0.164 | 0.163 | | | | | | 1.07 |
| Day 5 | | | | | | | | | |
| 37 C., | H7 | 0.17 | 0.171 | 0.167 | 0.005 | 3.3 | 4 | 0.668 | |
| 8 hr, | H8 | 0.164 | 0.163 | | | | | | 1.10 |
| Day 7 | | | | | | | | | |
| 37 C., | A9 | 0.14 | 0.133 | 0.131 | 0.333 | 2 | 4 | 0.525 | |
| 8 hr, | A10 | 0.137 | 0.129 | | | | | | 0.86 |
| Day 9 | | | | | | | | | |
| 37 C., | B9 | 0.131 | 0.122 | 0.122 | 0.001 | 0.7 | 4 | 0.486 | |
| 8 hr, | B10 | 0.13 | 0.121 | | | | | | 0.80 |
| Day 14 | | | | | | | | | |
| 37 C., | C9 | 0.139 | 0.132 | 0.136 | 0.005 | 3.9 | 4 | 0.0542 | |
| 24 hr, | C10 | 0.145 | 0.139 | | | | | | 0.89 |
| Day 4 | | | | | | | | | |
| 37 C., | D9 | 0.137 | 0.129 | 0.13 | 0.001 | 0.7 | 4 | 0.52 | |
| 24 hr, | D10 | 0.138 | 0.131 | | | | | | 0.85 |
| Day 5 | | | | | | | | | |
| 37 C., | E9 | 0.134 | 0.126 | 0.126 | 0 | 0 | 4 | 0.503 | |
| 24 hr, | E10 | 0.134 | 0.126 | | | | | | 0.83 |
| Day 7 | | | | | | | | | |
| 37 C., | F9 | 0.133 | 0.125 | 0.122 | 0.003 | 2.8 | 4 | 0.489 | |
| 24 hr, | F10 | 0.129 | 0.12 | | | | | | 0.8 |
| Day 9 | | | | | | | | | |
| 37 C., | G9 | 0.122 | 0.111 | 0.112 | 0.001 | 0.7 | 4 | 0.448 | |
| 24 hr, | G10 | 0.123 | 0.113 | | | | | | 0.74 |
| Day 14 | | | | | | | | | |

[0232] Klotho Concentration Changes in Time Course

TABLE 38

| | Room | −15° C. | 0° C. | 0° C. | 37° C. | 37° C. |
|---|---|---|---|---|---|---|
| | Temp | 8 hr | 8 hr | 24 hr | 8 hr | 24 hr |
| Day 4 | 100% | 67% | 94% | 104% | 96% | 89% |
| Day 5 | 103% | 84% | 101% | 102% | 107% | 85% |
| Day 7 | 103% | 60% | 97% | 96% | 110% | 83% |
| Day 9 | 96% | 54% | 100% | 97% | 86% | 80% |
| Day 14 | 105% | 58% | 97% | 81% | 80% | 74% |

[0233] Plate 4, Donor 4:
[0234] Standard Calculations

TABLE 39

| Sample | Concentration | Wells | BackConcCalc | Values | MeanValue | Std. Dev. | CV % |
|---|---|---|---|---|---|---|---|
| St01 | 6 | A1 | 5.507 | 2.715 | 2.671 | 0.062 | 2.3 |
| | | A2 | 5.321 | 2.627 | | | |
| St02 | 3 | B1 | 3.058 | 1.542 | 1.546 | 0.006 | 0.4 |
| | | B2 | 3.074 | 1.55 | | | |
| St03 | 1.5 | C1 | 1.623 | 0.839 | 0.825 | 0.019 | 2.3 |
| | | C2 | 1.569 | 0.812 | | | |
| St04 | 0.75 | D1 | 0.794 | 0.422 | 0.412 | 0.013 | 3.3 |
| | | D2 | 0.757 | 0.403 | | | |
| St05 | 0.375 | E1 | 0.422 | 0.23 | 0.222 | 0.011 | 4.8 |
| | | E2 | 0.393 | 0.215 | | | |
| St06 | 0.188 | F1 | 0.19 | 0.107 | 0.105 | 0.003 | 2.7 |
| | | F2 | 0.182 | 0.103 | | | |
| St07 | 0.094 | G1 | 0.086 | 0.05 | 0.05 | 0 | 0 |
| | | G2 | 0.086 | 0.05 | | | |

[0235] Sample Calculations

TABLE 40

| | | | | | | | | | Difference |
|---|---|---|---|---|---|---|---|---|---|
| Sample | Wells | Values | Result | MeanResult | Std. Dev. | CV % | Dilution | Adj. Result | to 0 h |
| 0 h | A3 | 0.105 | 0.186 | 0.214 | 0.04 | 18.5 | 4 | 0.857 | 1.00 |
| | A4 | 0.135 | 0.242 | | | | | | |
| RT | B3 | 0.127 | 0.227 | 0.215 | 0.017 | 8 | 4 | 0.86 | 1.00 |
| Day 4 | B4 | 0.114 | 0.203 | | | | | | |
| RT | C3 | 0.127 | 0.227 | 0.216 | 0.016 | 7.3 | 4 | 0.864 | 1.01 |
| Day 5 | C4 | 0.115 | 0.205 | | | | | | |
| RT | D3 | 0.105 | 0.186 | 0.183 | 0.005 | 2.9 | 4 | 0.73 | 0.85 |
| Day 7 | D4 | 0.101 | 0.179 | | | | | | |
| RT | E3 | 0.092 | 0.162 | 0.168 | 0.008 | 4.7 | 4 | 0.671 | 0.78 |
| Day 9 | E4 | 0.098 | 0.173 | | | | | | |
| RT | F3 | 0.092 | 0.162 | 0.167 | 0.007 | 3.9 | 4 | 0.667 | 0.78 |
| Day 14 | F4 | 0.097 | 0.171 | | | | | | |
| −15 C., | G3 | 0.053 | 0.091 | 0.088 | 0.004 | 4.3 | 4 | 0.535 | 0.41 |
| 8 hr | G4 | 0.05 | 0.086 | | | | | | |
| Day 4 | | | | | | | | | |
| −15 C., | H3 | 0.093 | 0.164 | 0.13 | 0.048 | 36.7 | 4 | 0.521 | 0.61 |
| 8 hr | H4 | 0.056 | 0.096 | | | | | | |
| Day 5 | | | | | | | | | |
| −15 C., | A5 | 0.065 | 0.113 | 0.105 | 0.012 | 11 | 4 | 0.418 | 0.49 |
| 8 hr | A6 | 0.056 | 0.096 | | | | | | |
| Day 7 | | | | | | | | | |
| −15 C., | B5 | 0.04 | 0.068 | 0.061 | 0.01 | 16.6 | 4 | 0.242 | 0.28 |
| 8 hr | B6 | 0.032 | 0.054 | | | | | | |
| Day 9 | | | | | | | | | |
| −15 C., | C5 | 0.037 | 0.062 | 0.058 | 0.006 | 10.8 | 4 | 0.232 | 0.27 |
| 8 hr | C6 | 0.032 | 0.054 | | | | | | |
| Day 14 | | | | | | | | | |
| 0 C., | D5 | 0.11 | 0.195 | 0.192 | 0.005 | 2.7 | 4 | 0.767 | 0.89 |
| 8 hr, | D6 | 0.106 | 0.188 | | | | | | |
| Day 4 | | | | | | | | | |
| 0 C., | E5 | 0.118 | 0.21 | 0.208 | 0.003 | 1.3 | 4 | 0.834 | 0.97 |
| 8 hr, | E6 | 0.116 | 0.207 | | | | | | |
| Day 5 | | | | | | | | | |
| 0 C., | F5 | 0.111 | 0.197 | 0.194 | 0.005 | 2.7 | 4 | 0.774 | 0.9 |
| 8 hr, | F6 | 0.107 | 0.19 | | | | | | |
| Day 7 | | | | | | | | | |
| 0 C., | G5 | 0.199 | 0.175 | 0.169 | 0.009 | 5.4 | 4 | 0.675 | 0.79 |
| 8 hr, | G6 | 0.092 | 0.162 | | | | | | |
| Day 9 | | | | | | | | | |
| 0 C., | H5 | 0.093 | 0.164 | 0.161 | 0.004 | 2.4 | 4 | 0.645 | 0.75 |
| 8 hr, | H6 | 0.09 | 0.158 | | | | | | |
| Day 14 | | | | | | | | | |
| 0 C., | A7 | 0.124 | 0.222 | 0.211 | 0.014 | 6.9 | 4 | 0.845 | 0.99 |
| 24 hr, | A8 | 0.113 | 0.201 | | | | | | |
| Day 4 | | | | | | | | | |
| 0 C., | B7 | 0.108 | 0.192 | 0.19 | 0.003 | 1.4 | 4 | 0.76 | 0.89 |
| 24 hr, | B8 | 0.106 | 0.188 | | | | | | |
| Day 5 | | | | | | | | | |
| 0 C., | C7 | 0.096 | 0.17 | 0.171 | 0.003 | 1.5 | 4 | 0.686 | 0.8 |
| 24 hr, | C8 | 0.098 | 0.173 | | | | | | |
| Day 7 | | | | | | | | | |
| 0 C., | D7 | 0.094 | 0.166 | 0.168 | 0.003 | 1.6 | 4 | 0.671 | 0.78 |
| 24 hr, | D8 | 0.096 | 0.17 | | | | | | |
| Day 9 | | | | | | | | | |
| 0 C., | E7 | 0.078 | 0.136 | 0.142 | 0.008 | 5.5 | 4 | 0.568 | 0.66 |
| 24 hr, | E8 | 0.084 | 0.147 | | | | | | |
| Day 14 | | | | | | | | | |
| 37 C., | F7 | 0.115 | 0.205 | 0.208 | 0.005 | 2.5 | 4 | 0.834 | 0.97 |
| 8 hr, | F8 | 0.119 | 0.212 | | | | | | |
| Day 4 | | | | | | | | | |
| 37 C., | G7 | 0.102 | 0.181 | 0.179 | 0.003 | 1.5 | 4 | 0.715 | 0.83 |
| 8 hr, | G8 | 0.1 | 0.177 | | | | | | |
| Day 5 | | | | | | | | | |
| 37 C., | H7 | 0.104 | 0.184 | 0.182 | 0.004 | 2.2 | 4 | 0.726 | 0.85 |
| 8 hr, | H8 | 0.101 | 0.179 | | | | | | |
| Day 7 | | | | | | | | | |
| 37 C., | A9 | 0.072 | 0.125 | 0.122 | 0.005 | 4.2 | 4 | 0.487 | 0.57 |
| 8 hr, | A10 | 0.068 | 0.118 | | | | | | |
| Day 9 | | | | | | | | | |
| 37 C., | B9 | 0.067 | 0.116 | 0.111 | 0.008 | 6.9 | 4 | 0.444 | 0.52 |
| 8 hr, | B10 | 0.061 | 0.105 | | | | | | |
| Day 14 | | | | | | | | | |
| 37 C., | C9 | 0.067 | 0.116 | 0.113 | 0.005 | 4.6 | 4 | 0.451 | 0.53 |
| 24 hr, | C10 | 0.063 | 0.109 | | | | | | |
| Day 4 | | | | | | | | | |
| 37 C., | D9 | 0.075 | 0.131 | 0.132 | 0.001 | 1 | 4 | 0.528 | 0.62 |
| 24 hr, | D10 | 0.076 | 0.133 | | | | | | |
| Day 5 | | | | | | | | | |
| 37 C., | E9 | 0.068 | 0.118 | 0.115 | 0.004 | 3.3 | 4 | 0.462 | 0.54 |
| 24 hr, | E10 | 0.065 | 0.113 | | | | | | |
| Day 7 | | | | | | | | | |
| 37 C., | F9 | 0.072 | 0.125 | 0.122 | 0.005 | 4.2 | 4 | 0.487 | 0.57 |
| 24 hr, | F10 | 0.068 | 0.118 | | | | | | |
| Day 9 | | | | | | | | | |
| 37 C., | G9 | 0.061 | 0.105 | 0.105 | 0 | 0 | 4 | 0.422 | 0.49 |
| 24 hr, | G10 | 0.061 | 0.105 | | | | | | |
| Day 14 | | | | | | | | | |

[0236] Klotho Concentration Changes in Time Course

TABLE 41

| | Room | −15° C. | 0° C. | 0° C. | 37° C. | 37° C. |
|---|---|---|---|---|---|---|
| | Temp | 8 hr | 8 hr | 24 hr | 8 hr | 24 hr |
| Day 4 | 100% | 41% | 89% | 99% | 97% | 53% |
| Day 5 | 101% | 61% | 97% | 89% | 83% | 62% |
| Day 7 | 85% | 49% | 90% | 80% | 85% | 54% |
| Day 9 | 78% | 28% | 79% | 78% | 57% | 57% |
| Day 14 | 78% | 27% | 75% | 66% | 52% | 49% |

[0237] In light of the foregoing, at least one embodiment includes a Klotho detection kit and/or assay. The inventive kit and/or assay may be suitable for CLIA lab testing of clinical samples. The kit can be configured (specifically) for use in monitoring, detecting, and/or quantifying, or diagnosing deficiency of one or more proteins selected from (1) Native (e.g., endogenous) Klotho, (2) recombinant Klotho-Fc fusion, and (3) recombinant 6xHis Klotho. The Klotho protein can be detected in a biological sample. The sample can be (substantially) unpurified in some embodiments. For example, the sample can be or comprise mammalian (e.g., human) blood and/or plasma.

[0238] In at least one embodiment, a kit can comprise one or more lancets adapted, configured, or suitable for a finger prick, a sample collection container adapted, configured, or suitable for collecting blood from a finger prick, one or more antiseptic elements, such as disposable (e.g., alcohol) wipe(s), one or more adhesive bandages, a foil envelope or other biopackaging, and a shipping container, such as an envelope.

[0239] Some embodiments can include a method of diagnosing Klotho deficiency in a mammalian subject. The method can include obtaining a fluid sample mixture selected from the group consisting of: (i) mammalian serum, optionally in the form of capillary blood, mixed with a preservative or anti-coagulant comprising one or more of heparin, lithium heparin, EDTA, and K2 EDTA, the mammalian serum having an amount of soluble Klotho protein; and (ii) mammalian serum, optionally in the form of capillary blood, the mammalian serum having an amount of soluble Klotho protein, the method further comprising mixing the mammalian serum with a preservative or anti-coagulant comprising one or more of heparin, lithium heparin, EDTA, and K2 EDTA to form the mixture. The method can also include storing the mixture for at least 24 hours, or more, at room temperature, the preservative or anti-coagulant stabilizing the soluble Klotho protein for the at least 24 hours, or more, at room temperature. After the storing step, the method can include quantifying the amount of the soluble Klotho protein in the mixture. The method can also include diagnosing the mammalian subject with Klotho deficiency when the quantified amount of soluble Klotho protein in the mixture is less than a predetermined threshold amount.

[0240] As described above, the fluid sample mixture comprises about 10-1000 ul, preferably about 50-200 ul of capillary blood from the mammalian subject, or wherein the step of obtaining the fluid sample mixture comprises obtaining about 10-1000ul, preferably about 50-200 ul of capillary blood from the mammalian subject. The step of quantifying the amount of the soluble Klotho protein in the mixture comprises detecting the soluble Klotho protein using a first antibody that binds to a portion of the soluble Klotho protein, and optionally, detecting the soluble Klotho protein using a detection antibody that binds to a portion of the first antibody or performing an enzyme-linked immunosorbent assay (ELISA) to detect and optionally quantify the soluble Klotho protein. Mass spectrometry can also be used to detect proteins.

[0241] In some embodiments, a diagnostic or informational report can be prepared. The report can include an indication or display of measured Klotho level(s) for one or more Klotho proteins. In some embodiments, the report can display a comparison chart or graph depicting the measured level overlaid on an age-based graph illustrating average or median Klotho levels for various ages and, optionally, indication of the 25^{th} percentile and/or 75^{th} percentile for the various ages. FIG. 13 illustrates an example report graph or chart. Thus, in some embodiments, diagnosing the mammalian subject with Klotho deficiency comprises displaying a Klotho deficiency determination, indication, or diagnosis on a user interface of a computer system and/or producing a file or report, in physical or electronic form, that displays the Klotho deficiency determination, indication, or diagnosis, the Klotho deficiency determination, indication, or diagnosis optionally including the quantified amount of the soluble Klotho protein and/or the predetermined threshold amount.

[0242] It will be appreciated that the term “diagnosis,” or diagnosing,” and similar terms, as used herein, is not intended to convey or require (in all cases) a certified, regulatory-compliant, medical diagnosis, as required or regulated by the U.S. Food and Drug Administration (FDA) or any other government or non-government entity, organization, or agency. Rather, “diagnosis,” or diagnosing,” and similar terms relates to providing information that may be indicative of a condition and/or helpful in making a determination related to the condition.

[0243] In some embodiments, one or more additional analytes can be monitored, detected, and/or quantified. Illustratively, the additional analytes can be related to Kidney disease, fibrotic diseases, and/or aging. In some embodiments, the one or more additional analytes can be selected from the group consisting of FGF, PTH, non-oxidized PTH, Vit D, Vit E, KIM-1, NGAL, Interleukins and other inflammatory bio-markers, testosterone, estrogen, etc.

### Therapeutic Proteins

[0244] Embodiments of the present disclosure can include one or more therapeutic and/or recombinant human alpha soluble Klotho proteins, protein fragments, and/or protein variants.

[0245] The protein can comprise all or a subset of amino acid residues 1-1012, 1-981, 29-981, 34-981, 36-981, 131-981, 1-549, 29-549, 34-549, 36-549, or 131-549 of human alpha Klotho isoform 1 or 2. The protein can have at least and/or about 80% amino acid sequence identity to all or a subset of amino acid residues 1-1012, 1-981, 29-981, 34-981, 36-981, 131-981, 1-549, 29-549, 34-549, 36-549, or 131-549 of human alpha Klotho isoform 1 or 2. For instance, at least a portion of the protein can have at least 80%, etc amino acid sequence identity to at least a portion of one of SEQ ID NO: 2 through SEQ ID NO: 70 or SEQ ID NO: 107 through SEQ ID NO: 120 or SEQ ID NO: 125 through SEQ ID NO: 128 or SEQ ID NO: 133 or SEQ ID NO: 152, or a combination of two or more thereof. Other portions or fragments of the protein sequences described in the present application are also contemplated herein. For instance, some embodiments can include a protein having at least a portion with at least 80%, etc amino acid sequence identity to any suitable portion of one of SEQ ID NOS: 1-75, or a combination of two or more thereof.

[0246] Some embodiments can include a protein having one or more amino acid variations as compared to human alpha Klotho isoform 1. Illustratively, the protein can comprise a human C370 variant. For instance, the protein can include a C370S alteration, thereby comprising S370. The protein can include human F352 or other than F352V in some embodiments. In at least one embodiment, the protein can include the C370S alteration, thereby comprising S370, without a F352V variant, preferably with F352. The protein can include H193 or other than the H193R variant. All other standard amino acid substitutions at amino acid residue (or position) 193, 352, and/or 370 of human alpha Klotho isoform 1 are contemplated and explicitly disclosed herein.

[0247] Some embodiments can include a variation at amino acid residue 45 of human alpha Klotho isoform 1. At position 45, the residue can be a valine (Val; V), a phenylalanine (Phe; F), or another amino acid.

[0248] The protein can also include one or more glycans (attached thereto). For instance, native human alpha Klotho isoform 1 can have glycans attached (via glycosylation) at amino acids 106, 159, 283, 344, 604, 612, and/or 694. Accordingly, the proteins of the present disclosure, or Klotho protein sequences thereof, can have one or more of the same (or similar) glycans attached (via glycosylation) thereto (e.g., at the same amino acid position(s)). In a preferred embodiment, the protein includes all of the same or similar (native-type) glycans attached thereto, at the same amino acid position(s).

[0249] In some embodiments, the protein can include a signal peptide or signaling sequence. For example, the protein can include a native Klotho signaling sequence. The protein can include a non-native or synthetic signaling sequence. In some embodiments, the signaling sequence can be an N-terminal signaling sequence and/or upstream of (or N-terminal to) a Klotho protein sequence. In other embodiments, the signaling sequence can be C-terminal or otherwise disposed. Preferably, the signaling sequence can be, comprise, or have at least 80% amino acid sequence identity to native human alpha Klotho isoform 1 signaling sequence, native human alpha Klotho isoform 2 signaling sequence, SEQ ID NO: 71 or SEQ ID NO: 72.

[0250] In some embodiments, the protein can include an amino acid tag. The tag can be a C-terminal tag and/or downstream of (or C-terminal to) a Klotho protein sequence. In other embodiments, the tag can be N-terminal or otherwise disposed. The tag can be or comprise an Fc-peptide (or Fc-fusion tag, Fc domain, etc.). For instance, the tag can be or comprise an IgG1-Fc protein sequence. Preferably, the tag can be, comprise, or have at least 80% amino acid sequence identity to SEQ ID NO: 74.

[0251] The tag can also, or alternatively, be or comprise a peptide comprising a Twin-Strep protein sequence, such as a Twin-Strep tag or protein sequence (e.g., as known in the art). Preferably, the signaling sequence can be, comprise, or have at least 80% amino acid sequence identity to SEQ ID NO: 75, SEQ ID NO: 102, SEQ ID NO: 103, SEQ ID NO: 104.

[0252] The tag can also, or alternatively, be or comprise a polysialic acid (PSA). In at least one embodiment, the PSA tag can render the conjugated (Klotho) protein resistant to one or more proteases. In some embodiments, maintaining an amount (e.g., even a relatively small amount) of sialic acid in the protein conjugate can prevent protease attack and subsequent targeting, breakdown, and clearance of the molecule (e.g., through the liver).

[0253] In at least one embodiment, the tag can be cleaved from the protein. In other embodiments, the tag can be retained as part of the protein. In some embodiments, the tag can enhance solubility and/or (serum) half-life of the protein. In some embodiments, the tag can be utilized during protein purification (e.g., as part of a purification mechanism).

[0254] In some embodiments, the protein can include a linker (e.g., amino acid linker) disposed between a Klotho protein sequence and an amino acid tag. Illustratively, the linker can comprise between 1 and 40 amino acids, preferably between 5 and 20 amino acids, more preferably between 6 and 12 amino acids, most preferably between about 8 to 10 amino acids. The linker can be or comprise a GS linker (e.g., a (G₄S)₂ linker) or other linker (e.g., a GGENLYFQ linker) in some embodiments. Preferably, the linker can be, comprise, or have at least 80% amino acid sequence identity to SEQ ID NO: 73 or SEQ ID NO: 105.

[0255] In at least one embodiment, the protein can be cGMP regulation compliant, as determined and enforced by the U.S. Food and Drug Administration (FDA). For instance, the Klotho protein can be at least 90%, 92%, 95%, 96%, 97%, 98%, or 99% pure, dry weight. In some embodiments, the Klotho protein sample can include less than about 1-100 parts per million (ppm), less than about 100-1000 parts per billion (ppb), or less than about 1-100 ppb CHO host cell proteins (HCP), nucleic acid, and/or other cellular components, or any value or range of values disposed therebetween.

### Klotho Protein Variants

[0256] Therapeutic S-Klotho proteins of various lengths (e.g., S-Klotho, isoform 1 or 2, 1-981, 29-981, 34-981, 36-981, 131-981, 1-549, 29-549, 34-549, 36-549, 131-549, and so forth) can be modified in a variety of ways to achieve various beneficial effects and/or results not exhibited in native Klotho proteins. Illustratively, the QuickChange XL Site-Directed Mutagenesis Kit (Stratagene) can be used to alter the nucleic acid sequence of various S-Klotho constructs. Other mutagenesis methods and kits as known in the art can also be used. For instance, various sub-cloning methods and kits are known in the art and commercially available. Amino acid changes may affect (e.g., improve, enhance, decrease, etc.) protein expression, protein stability, protein solubility, protein binding, protein specificity, protein activity, protein function, immunogenicity, toxicity, etc.

[0257] In at least one embodiment of the present disclosure, a protein is modified with one or more C-terminal tags and/or N-terminal tags. Such tags can function to extend the serum and/or soluble half-life of the protein (in one or more therapeutic or other environments). Tags can also be useful as markers for the presence or diagnostic localization of the protein, isolation or removal of the protein, delivery or transport of the protein, binding of the protein to one or more targets (e.g., protein, nucleic acid, organelle, cellular structural component, etc.), enzymatic processing or cleavage, and so forth. In at least one embodiment, the C-terminus of the protein can be tagged with a TEV-Twin-Strep tag or sequence, an immunoglobulin (IgG1) Fc domain tag or sequence, or other tag or sequence as known in the art and/or described further herein. Additional description can be found in the articles “Fusion Proteins for Half-Life Extension of Biologics as a Strategy to Make Biobetters,” “What is the future of PEGylated therapies?” and “Strategies for extended serum half-life of protein therapeutics,” the entirety of each of which is incorporated herein by specific reference. In certain embodiments, a linker or linker peptide can be inserted and/or disposed between the (native or variant) Klotho protein sequence and the tag.

[0258] In some embodiments, the modified Klotho protein can include an alternative (e.g., native, non-native, and/or synthetic) signal peptide. For instance, in some embodiments, the native signal peptide sequences can be replaced and/or supplemented with an alternative signal peptide or signaling sequence (SS). In some embodiments, a native Methionine residue of a Klotho protein can be removed and a Methionine residue at the N-terminus of the SS can be included. Additional description can be found in the thesis “Generation of high expressing CHO cell lines for the production of recombinant antibodies using optimized signal peptides and a novel ER stress based selection system,” the entirety of which is incorporated herein by specific reference. In certain embodiments, a linker or linker peptide can be inserted and/or disposed between the (native or variant) Klotho protein sequence and the alternative SS.

[0259] Some embodiments can include one or more amino acid variants. It will be appreciated that the present disclosure contemplates variation of any one or more of the native amino acids in any of the disclosed Klotho proteins to any other amino acid, whether naturally-occurring, synthetic, or otherwise configured.

### S-Klotho V45F Protein Variant

[0260] Substituting a Phenylalanine in the place of the Valine at (native) position 45 of human alpha Klotho (V45F) has been found by the Inventors to have surprising and unexpected benefits. For example, V45F soluble Klotho, and fragments or fusion proteins thereof, express at higher levels in CHO and HEK-293 cells than does the native, wild type V45 protein. Commercially, achieving higher levels of soluble protein expression can be desirable. Accordingly, some embodiments of the present disclosure include a Klotho protein having the V45F substitution.

### S-Klotho C370S Protein Variant

[0261] In humans, the Klotho gene maps on chromosome 13q12. A variant, known as KL-VS, is present in approximately 15-25% of Caucasians. The variant is composed of six single nucleotide polymorphisms (SNPs), two of which cause amino acid substitutions (i.e. F352V and C370S—Phenylalanine 352 changed to Valine and Cysteine 370 changed to Serine). In vitro transfection assays have shown that secreted levels of klotho are reduced 6-fold for the V352 variant, while they are increased almost 3-fold for the S370 form. However, these two variants in the human KLOTHO gene segregate together and form the KL-VS haplotype that increases klotho secretion in the range of 1.6-fold. For instance, it has been reported that in a screening of over 300 individuals taken from the geographically and/or ethnically distinct cohorts, not a single individual was found to harbor only one of the V352 variant or the S370 variant.

[0262] An embodiment of the present disclosure includes a recombinant S-Klotho protein having the C370S homovariant (i.e., without the presence (or with deletion) of the F352V variant). The C370S variant can be produced and/or expressed in the context of any protein construct described herein. For instance, the C370S variant can be produced or expressed in the context of S-Klotho, isoform 1 or 2, 1-981, 29-981, 34-981, 36-981, 131-981, 1-549, 29-549, 34-549, 36-549, 131-549, and so forth, with or without a tag (e.g., (IgG) Fc tag, TEV-Twin-Strep tag, TEV sequence, etc.). Accordingly, the nucleic acid construct or cDNA from which the protein is expressed can be of corresponding length.

[0263] Embodiments can include producing a S370 heterozygous or homozygous variant construct, transferring (e.g., via transfection) the resulting construct, which encodes the S-Klotho C370S protein, into an appropriate expression system (e.g., CHO cells), and/or transiently expressing the S-Klotho S370 protein. The S370 Klotho protein may be expressed at higher levels than the F352V/C370S protein and/or wild-type F352/C370 protein. Embodiments can include purifying (and optionally quality-control testing) the expressed protein for therapeutic administration. Embodiments can include administering a therapeutic or therapeutically-effective amount of the S-Klotho C370S protein to a subject in need thereof. The subject may, for example, harbor or express the KL-VS variant. Alternatively, the subject may be of wild-type of other mutant or variant type. Administration of the recombinant S-Klotho C370S protein can lead to a beneficial increase in blood S-Klotho levels. Accordingly, the circulating concentration of S-Klotho in subjects that receive the therapeutic, recombinant, S-Klotho C370S protein may not be subjected to the dilutive effects that are observed when the F352V variant is present.

### Nucleic Acids and Expression Vectors

[0264] Some embodiments can include a nucleic acid or nucleic acid construct. For instance, embodiments can include an expression vector or nucleic acid construct. The nucleic acid can encode a recombinant human alpha soluble Klotho protein, protein fragment, or protein variant, as described herein. In at least one embodiment, the nucleic acid can encode a Klotho protein sequence, an optional (native or non-native) signaling sequence (e.g., at the N-terminus or N-terminal of the Klotho protein sequence), an optional linker sequence (e.g., GS linker), and/or an amino acid tag (e.g., IgG1-Fc or TEV-Twin-Strep), as described herein.

[0265] In some embodiments, the nucleic acid can express a protein that includes all or a subset of amino acid residues 1-1012, 1-981, 29-981, 34-981, 36-981, 131-981, 1-549, 29-549, 34-549, 36-549, or 131-549 of human alpha Klotho isoform 1 or 2. At least a portion of the protein can have at least or about 80% amino acid sequence identity to all or a subset of amino acid residues 1-1012, 1-981, 29-981, 34-981, 36-981, 131-981, 1-549, 29-549, 34-549, 36-549, or 131-549 of human alpha Klotho (isoform 1 or 2). For instance, at least a portion of the protein can have at least and/or about 80% amino acid sequence identity to all or a portion of one of SEQ ID NO: 1 through SEQ ID NO: 75, or a combination of two or more thereof. In a preferred embodiment, the protein can have at least and/or about 80% amino acid sequence identity to all or a portion of one of SEQ ID NO: 2 through SEQ ID NO: 70 or SEQ ID NO: 107 through SEQ ID NO: 120 or SEQ ID NO: 125 through SEQ ID NO: 128 or SEQ ID NO: 133 or SEQ ID NO: 152.

[0266] In some embodiments, at least a portion of the nucleic acid can have at least and/or about 80% (e.g., at least about 82%, 85%, 86%, 87%, 88%, 89%, 90%, 91%, 92%, 93%, 94%, 95%, 96%, 97%, 98%, or 99%, or 100% nucleotide sequence identity to one of SEQ ID NO: 76 through SEQ ID NO: 106 or SEQ ID NO: 121 through SEQ ID NO: 124, or a combination of two or more thereof. In a preferred embodiment, the nucleic acid can have at least and/or about 80% nucleotide sequence identity to one of SEQ ID NO: 76 through SEQ ID NO: 106 or SEQ ID NO: 121 through SEQ ID NO: 124.

[0267] Nucleic acid sequences of the present disclosure can also include a stop codon, as known in the art (e.g., TGA, TAG, TAA).

### Cell Lines and Methods of Manufacture

[0268] An embodiment of the present disclosure can include a cell line. The cell line can comprise any suitable cell type, such as CHO cells, HEK cells, HL-60 cells, or other cell line as known in the art. Illustratively, the cell line can comprise CHO cells (e.g., a plurality of CHO cells). For the sake of brevity, reference to CHO cells contemplates a specific reference to HEK cells (e.g., HEK-293 cells), HL-60 cells, and/or any other (protein expression) cell(s) or cell line(s) known in the art. In some embodiments, the cells can (each) contain (one or more copies of) an exogenous nucleic acid. The nucleic acid can encode a polypeptide with at least and/or about 80% amino acid sequence identity to at least a portion of one of SEQ ID NO: 1 through SEQ ID NO: 75, or a combination of two or more thereof, preferably to one of SEQ ID NO: 2 through SEQ ID NO: 70.

[0269] The nucleic acid can comprise at least one transgene or cDNA. In some embodiments, at least a portion of the nucleic acid can have at least and/or about 80% nucleic acid sequence identity to one of SEQ ID NO: 76 through SEQ ID NO: 106 or SEQ ID NO: 121 through SEQ ID NO: 124, or a combination of two or more thereof, preferably one of SEQ ID NO: 76 through SEQ ID NO: 106 or SEQ ID NO: 121 through SEQ ID NO: 124. The nucleic acid can be or comprise a plasmid or other (structural) form of nucleic acid.

[0270] In some embodiments, the exogenous nucleic acid can encode a functional enzyme, such as dihydrofolate reductase (DHFR) and/or glutamine synthetase (GS). In at least one embodiment, the cells can be or comprise dihydrofolate reductase (DHFR)-deficient CHO cells, such as CHO-S cells or CHO-M cells. The nucleic acid can include a promoter (e.g., a weak up to a strong promoter, as understood by those skilled in the art). For instance, in some embodiments, the nucleic acid can include a (strong) promoter associated with the transgene having at least 80%, etc. nucleic acid sequence identity to one of SEQ ID NO: 2 through SEQ ID NO: 70 or SEQ ID NO: 107 through SEQ ID NO: 120 or SEQ ID NO: 125 through SEQ ID NO: 128 or SEQ ID NO: 133 or SEQ ID NO: 152. Thus, the transgene can be under the control of a promoter.

[0271] For convenience, CHO cells and/or cell lines are referred to throughout the present disclosure. It is noted, however, that other cells, cell lines and/or host cells (besides CHO cells) are also contemplated within the scope of the present disclosure. Accordingly, a reference to CHO cells and/or cell lines also contemplates reference to and/or use of other known cells, cell lines and/or host cells (e.g., HEK cells, such as HEK-293 cells, HL-60 cells, and so forth).

### Transfection

[0272] A method of manufacturing the cell line can include introducing the exogenous nucleic acid into the cells, preferably via transfection, or other technique, as known in the art. In at least one embodiment, a serum-free growth optimized, cell-suspension of a cell line was used as the host cell line for insertion of a nucleic acid (plasmid) containing a promoter, a human alpha S-klotho transgene encoding a polypeptide with at least 80% amino acid sequence identity to at least a portion of one of SEQ ID NO: 2 through SEQ ID NO: 70 or SEQ ID NO: 107 through SEQ ID NO: 120 or SEQ ID NO: 125 through SEQ ID NO: 128 or SEQ ID NO: 133 or SEQ ID NO: 152, and a selectable (enzyme) marker. The transgenes, respectively, encode amino acids 1 through 981, 29 through 981, or 34 through 981 of human alpha soluble Klotho. In particular embodiments, the transgenes had sequence portion(s) corresponding to one or more of SEQ ID NO: 76 through SEQ ID NO: 106 or SEQ ID NO: 121 through SEQ ID NO: 124 (or had at least 80% nucleic acid sequence identity to one of SEQ ID NO: 76 through SEQ ID NO: 106 or SEQ ID NO: 121 through SEQ ID NO: 124). For DHFR-deficient CHO cell lines (such as the CHO-S cell line), the selectable (enzyme) marker was exogenous DHFR. For other cell lines, the selectable (enzyme) marker was exogenous GS.

Growth, Selection and/or Gene Amplification

[0273] Some embodiments can include growing the cells (e.g., transfected cells) on a solid medium and/or in a liquid medium (e.g., in suspension cell culture), preferably in a serum-free and/or animal (or animal-derived) protein (component) free medium. For instance, cells can be plated on solid growth media for a period of time. The cells can also or alternatively be grown in suspension culture and/or in liquid medium. The liquid medium preferably comprises a carbon source, a nitrogen source, and one or more vitamins, minerals, salts, amino acids, supplements, or additives. In some embodiments, the medium can also lack hypoxanthine and thymidine (HT), glutamine, etc.

[0274] In at least one embodiment, after a certain period of time (e.g., 48 hours post-transfection), the cells can be gathered (e.g., detached), optionally centrifuged (e.g., at 100×g for 5 min.), and/or seeded (e.g., at approximately 2000 cells/well), such as into a 96-well adherent culture plate (e.g., containing serum supplemented, -HT and/or -glutamine media). The medium can also include MTX and/or MSX in certain embodiments. Non-transfected cells may die within 7-14 days after selection (e.g., after exposure to MTX and/or MSX in -HT and/or -glutamine media.

[0275] In certain embodiments, the cells can (be selected to) contain at least about 2 to 10 copies, at least about 10 to 20 copies, at least about 20 to 30 copies, or at least about 30 to 50 copies of the exogenous nucleic acid (e.g., per cell). Accordingly, the method can include selecting cells that contain at least about 2 to 10 copies, at least about 10 to 20 copies, at least about 20 to 30 copies, or at least about 30 to 50 copies of the exogenous nucleic acid (e.g., per cell). For instance, (successively increasing levels of) MTX and/or MSX can be administered to the cells (e.g., at a concentration of about 1 nM-1μM, about 10-100 nM, etc.).

[0276] Dihydrofolate reductase (DHFR) gene amplification in DHFR-deficient CHO cells (such as the CHO-S cell line) transfected with exogenous DHFR, was accomplished by successively increasing levels of methotrexate (MTX) in growth medium. Because the plasmid contains DHFR, this allows for the amplification of the S-klotho gene (fragment) within the host cell upon exposure to MTX (10-100 nM). The GS gene expression system was also used to amplify cells transfected with exogenous GS (e.g., upon exposure to MSX). Alternatively, GS−/−host cell lines were also used, which removed the need for MSX. These steps resulted in the production of numerous copies of the S-klotho gene (e.g., between 10 to 30 copies of the gene per cell) and resultant high levels of expression of the S-klotho protein in the transgenic cell line.

[0277] In suspension culture, the protein can be secreted from the cells into the liquid medium in some embodiments. For instance, certain cells and/or cell lines of the present disclosure can secrete (or be selected to secrete) up to a concentration of 200-500 mg of protein per liter of liquid medium, 500-2000 mg of protein per liter of liquid medium, 2000-5000 mg of protein per liter of liquid medium, or any value or range of values therebetween (without concentrating the protein). In at least one embodiment, high producing cell lines (or suspension cultures) can be selected, such that the concentration of human recombinant alpha soluble Klotho protein in the medium (of the selected suspension culture or suspension cultures of the selected cell lines) is at least 200 mg/L, preferably at least 500 mg/L, more preferably at least 1000 mg/L, even more preferably at least 2000 mg/L, still more preferably at least 5000 mg/L, without concentrating the protein.

[0278] Sub-cloning of the resultant high S-klotho producing, transgene-containing colonies by limited cell dilution was conducted to further produce S-klotho-secreting cell lines that secrete in the range of 500 to 2000 mg/L S-klotho into the cells conditioned media. All cell constructs were restriction digested and sequence verified.

[0279] In some embodiments, the cells can be grown in a bioreactor having a volume or working volume of at least 10 liters, preferably at least 25 liters, more preferably at least 50 liters, even more preferably at least 100 liters, still more preferably at least 250 liters, still more preferably at least 500 liters, still more preferably at least 1,000 liters, still more preferably at least 2,000 liters, still more preferably at least 2,500 liters, still more preferably at least 5,000 liters, still more preferably at least 10,000 liters.

### Cell Line Maintenance

[0280] For the amplified high-producing S-Klotho cell lines (e.g., produced by DHFR/MTX or GS/MSX systems), optionally followed by cell subcloning, judicious use of concentrated media feeds administered to the production cell lines during scale-up and up to the final bioreactor run were done in serum-free and animal protein component-free basal media.

[0281] Scale-up of high producer cell lines was done by cell inoculum expansion in cell suspension in shake flasks or in the Wave Bag systems followed by the successive inoculation of the cells produced in 100 L and then 500 L capacity bioreactors. Cell viability was maintained at greater than 85% viable cells throughout the growth cycle in shake flasks, Wave Bags, or bioreactors; and then at 80% or greater viable cell counts in bioreactors during the plateau phase of CHO S cellular growth with the concomitant production of up to 1-3 g/L of S-klotho produced (designated as the “high producers”).

### Protein Production

[0282] Certain embodiments can employ recombinant DNA strategies that utilize strong promoter sequences and/or high copy number plasmids for production of therapeutic amounts of the Klotho protein in mammalian (e.g., CHO) cells. In at least one embodiment, for example, dihydrofolate reductase (DHFR) gene amplification in DHFR-deficient CHO cells can include providing and/or the use of (successively increasing levels of) methotrexate (MTX). Similarly, exogenous glutamine synthetase (GS) gene-containing cells can be treated with methionine sulphoximine (MSX).

[0283] The Klotho protein can also include one or more glycans (attached thereto). For instance, the native human alpha Klotho isoform 1 (SEQ ID NO: 1) can have glycans attached (via glycosylation) at amino acids 106, 159, 283, 344, 604, 612, and/or 694. The Klotho protein of the present disclosure can have one or more of the same (or similar) glycans attached (via glycosylation) thereto (e.g., at the same amino acid(s)).

[0284] In at least one embodiment, the protein can be cGMP regulation compliant, as determined and enforced by the U.S. Food and Drug Administration (FDA). For instance, the Klotho protein can be at least 90%, 92%, 95%, 96%, 97%, 98%, or 99% pure, dry weight. In some embodiments, the Klotho protein sample can include less than about 1-100 parts per million (ppm), less than about 100-1000 parts per billion (ppb), or less than about 1-100 ppb CHO host cell proteins (HCP), nucleic acid, and/or other cellular components, or any value or range of values disposed therebetween.

[0285] Glycan structures present on the S-Klotho proteins produced can be similar or identical in comparison to the structures on native S-klotho proteins isolated from human fluids (i.e., blood, serum, urine, cerebrospinal fluid). In at least one embodiment, confirmation of native-like glycans can ensure that the right native post-translation modifications (PTMs) are produced and stably maintained in the cell-produced S-Klotho protein.

Solubility and/or Half-Life Extension of Klotho Proteins

[0286] Disclosed are methods and compositions for extending the half-life and increasing the solubility of the human S-Klotho protein. Also, the purification and characterization of the protein constructs so produced to achieve these results are also the subject matter of the present disclosure. Relevant information regarding nucleic acid changes made in the sequence of the klotho gene or nucleic acid construct (see SEQ ID NOS: 76-96) and/or of changes, or chemical alterations in the amino acid sequence of a Klotho protein (see SEQ ID NOS: 1-70), and/or additions or subtraction of chemical groups, peptides, or proteins to the amino acid sequence of a Klotho protein is taught in the present disclosure in order to obtain resultant human Klotho variant proteins (novel compositions) with increased biological half-life or increased solubility in biological matrices (such as in blood, cerebrospinal fluid, urine, or various human tissues) than that of native Klotho molecules. These novel compositions can be made through the methods described herein for the modification of the S-Klotho protein.

[0287] Illustratively, fusion protein constructs can be produced by combining the S-Klotho protein with the Fc domains of an antibody (IgG), an albumin, such as human serum albumin (HSA), a transferrin, such as human transferrin (TF), and/or a proprietary recombinant polypeptide such as XTEN®. The novel proteins can also be produced by conjugating (or modifying) the S-Klotho protein with a posttranslational modification, such as polysialic acid (PSA) or pegylation. Moreover, a novel S-Klotho protein can be produced through pegylation. The foregoing and other (half-life extension) methodologies can improve the performance of the S-Klotho protein by one or more of: increasing the S-Klotho dosing interval; providing superior patient convenience and likely compliance; reducing dosing frequency requirement, resulting in lower drug use in the aggregate; reducing the cost of the drug; lowering drug quantities at the same dosing interval as the parent protein; simplifying dosage formulation and enabling subcutaneous formulation; providing higher drug levels using the same dose and dosing interval as the parent protein resulting in longer drug exposure and potentially better efficacy; and decreasing the immunogenicity of S-Klotho. Production of Fc domain fusion protein constructs of S-Klotho

[0288] Antibody Fc domain, human serum albumin (HSA), and polysialic acid (PSA) were tested for effectiveness in extending the half-life and increasing the solubility of the human S-Klotho protein. Fc fusions involve the fusion of peptides, proteins or receptor exodomains to the Fc portion of an antibody. Both Fc and albumin fusions achieve extended half-lives not only by increasing the size of the peptide drug, but both also take advantage of the body's natural recycling mechanism through binding of the extended protein to the neonatal Fc receptor, FcRn. After binding of the extended protein to the FcRn receptor, degradation of the fusion protein in the cells' endosome is prevented. Fusions based on the addition of Fc or albumin can result in biological half-lives in the range of 3-16 days, much longer than which has been reported for typical pegylated or lipidated peptides. For a review that describes the use of protein fusion technologies such as Fc fusion proteins, fusion to human serum albumin, fusion to carboxy-terminal peptide, and other polypeptide fusion approaches to make biobetter drugs with more desirable pharmacokinetic profiles see Strohl WR. Fusion Proteins for Half-Life Extension of Biologics as a Strategy to Make Biobetters. Biodrugs. 2015;29(4):215-239, the entirety of which is incorporated herein by specific reference.

[0289] Fc domains were thusly added to the parent protein (S-Klotho) to increase binding affinity to the Fc receptor (FcRn). FcRn is present inside lysosomes in endothelial cells lining the blood vessels and functions to rescue antibodies from the degradation that makes most proteins short-lived in circulation. As a result of interactions with FcRn, proteins have half-lives ranging from a few days to a few weeks, allowing for less frequent dosing of the extended form of the protein drugs than biologics that do not have this newly-produced composition-of-matter.

[0290] The dimeric nature of Fc versus the monomeric structure of HSA can lead to the presentation of a Fc fused peptide as a dimer or a monomer in contrast to HSA. The dimeric nature of a peptide Fc fusion can produce an avidity effect if the target receptors for S-Klotho are spaced closely enough together or are themselves dimers in particular human target organs. This may be desirable or not depending on the target. Fusion of the S-Klotho protein to antibody Fc is also taught in the present disclosure to improve the solubility and stability of S-Klotho. Surprisingly, Fc-fusion Klotho proteins appear to have improved binding, activity, and/or immunogenicity. The addition of Fc domains to S-Klotho will also allow the fusion protein to be less immunogenic upon administration in human subjects.

Conjugation of the S-Klotho protein with human serum albumin (HSA)

[0291] The 66.5 kDa protein HSA, similar to human IgGs, has a long average half-life in the 19-day range. At a concentration of ˜50 mg/mL (˜600 uM), HSA is the most abundant protein in human plasma, where it has several functions, including maintenance of plasma pH, metabolite and fatty acid transport, and a role in maintaining blood pressure. HSA, which is at the upper limit of size for glomerular filtration of proteins by the kidney, is also strongly anionic, which helps even more to retard its filtration via the kidney. Like IgGs, HSA also binds FcRn in a pH-dependent manner, albeit at a site different from—and via a mechanism distinct from—that of IgG binding, and is recycled similarly to IgGs, resulting in its extended half-life. HSA also tends to accumulate in tumors and in inflamed tissues, which suggests that fusion or binding to albumin may potentially help to target proteins or peptides to those sites.

[0292] The fusion of peptides or proteins with inherently short-half-life properties to HSA for prolongation of the serum half-life of these molecules has been investigated broadly since the early 1990s. Since then, dozens of different peptides and small proteins have been fused to HSA as both innovative and potential biobetter molecules. The first HSA-peptide or protein fusion product to be approved for marketing was Tanzeum® (marketed as Eperzan® in the European Union) a DPP-4-resistant GLP-1-HSA fusion protein discovered at Human Genome Sciences and developed and marketed by GlaxoSmithKline. Tanzeum® (albiglutide) was approved by the European Medicines Agency (EMA) and the FDA in March and April of 2014, respectively. HSA thus improved the half-life of pharmacologically active GLP-1 from 1-2 min for native GLP-1 to 4-7 days, which allows for once weekly dosing. Seven other known HSA fusion protein product candidates are either now in development or recently have been in development. Also, Novozyme, has been developing modified versions of recombinant HSA with improved FcRn binding for construction of “next-generation” HSA-protein fusions that may possess even longer half-life properties. This was based on the use of a K573P mutant of HSA, which was found to possess 12-fold greater affinity for FcRn, conferred a longer half-life on HSA than the wild type molecule in both mice and cynomolgus monkeys. The expectation is that these longer-half-life mutants of HSA may be of further use as fusion proteins to improve the half-life of fusion proteins.

[0293] The Inventors herein therefore disclose the fusion of Klotho proteins to wild type HSA or to a mutant form of HSA to produce a Klotho fusion molecule(s) with significantly prolonged half-life in human blood, cerebral spinal fluid, and other human biological matrices in order to bring about a strategic therapeutic benefit such as superior patient convenience and likely compliance, reduced dosing frequency resulting in lower drug use in aggregate, and/or reduced cost of goods. Also, lower drug quantities at the same dosing interval as the parent protein may simplify dosage formulation and enable subcutaneous formulation or decrease in the immunogenicity of S-Klotho. Surprisingly, HAS-fusion Klotho proteins appear to have improved binding, activity, and/or immunogenicity.

Conjugation of the S-Klotho Protein with Human Transferrin (TF)

[0294] Transferrin is a highly abundant serum glycoprotein, found in serum at 3-4 mg/mL, which binds iron tightly but reversibly and functions to carry iron to tissues. Transferrin has 679 amino acid residues, is about 80 kDa in size, and possesses two high-affinity Fe3+−binding sites, one in the N-terminal domain and the other in the C-terminal domain. Human transferrin has a half-life reported to be 7-10 days or 10-12 days. The aglycosylated form of human transferrin, which makes up about 2-8% of the total transferrin pool, has a slightly longer half-life of 14-17 days. The extended persistence of transferrin in human serum is due to a clathrin-dependent transferrin receptor-mediated mechanism, which recycles receptor-bound transferrin back into the circulation.

[0295] Fusions of peptide and proteins have been made to human transferrin to the N- and C-termini, as well as to the centrally located hinge region that links the two major lobes of transferrin together. The N terminus of transferrin is free and can be fused directly. The C terminus is more buried and is constrained by a nearby disulfide bond, so flexible linkers are typically used when proteins are fused to the C terminus. This capability was extended by making libraries of peptides against specific targets and then fusing binders from those libraries into aglyco-transferrin (N-terminal, C-terminal, loops, or linker region) to be developed into therapeutic fusion proteins with extended half-lives.

[0296] The biotechnology company BioRexis Technologies, Inc., was founded in 2002 to develop the transferrin fusion protein platform, which they termed the “Trans Body” platform, as a therapeutic platform. Their lead molecule, BRX-0585, was a transferrin-GLP-1 fusion protein for treatment of type 2 diabetes mellitus (T2DM). Fusion of GLP-1 to transferrin was demonstrated to significantly enhance the half-life of GLP-1. BioRexis was acquired by Pfizer in March 2007. As far as can be determined, no BioRexis-derived fusion proteins are currently in the clinic. Klotho protein can be fused to human transferrin to produce a Klotho fusion molecule, which can be administered clinically to significantly prolong half-life or stability in human biological matrices in vivo.

Conjugation of the S-Klotho Protein with XTEN from Amunix

[0297] XTEN® is a proprietary recombinant polypeptide that extends the in vivo half-life of therapeutic payloads. XTEN consists of naturally-occurring hydrophilic amino acids and is biodegradable. Pharmaceuticals such as proteins, peptides, and synthetic compounds can be XTENylated via chemical conjugation or genetic fusion. XTEN proteins lack secondary and tertiary structure and their solution behavior resembles chemically prepared polymers with very large hydrodynamic radii. By size exclusion chromatography, XTEN protein polymers appear much larger than typical globular proteins of similar molecular weight. The bulking effect of XTEN greatly reduces renal clearance of attached molecules, thus greatly increasing their in vivo half-lives. In the current invention, the length of XTEN polymers added to a Klotho protein will be customized to optimize the pharmacokinetics as well as the bio-distribution of the attached Klotho protein payloads.

[0298] XTEN thusly can be recombinantly-fused to S-Klotho protein(s) to increase the molecules in vivo half-life. One benefit is that with the genetic S-Klotho-XTEN fusion constructs, a molecule is produced that has the convenience of expression, purification and characterization of a single molecule which includes both the therapeutic and bulking moieties. Recombinant fusion allows the attaching of multiple XTEN chains per protein in precisely-defined locations and has been successfully used by therapeutic drug manufacturers, resulting in best-in-class pharmacokinetics as exemplified by XTENylated growth hormone (Somavaratan, from the company, Versartis) and FVIII-XTEN (from Biogen). For example, pharmacokinetic studies conducted in children receiving different doses of Somavaratan) have shown that XTENylation resulted in best-in-class half-life due to reduced receptor-mediated elimination in addition to kidney clearance.

[0299] XTEN protein polymers can be produced as free intermediates for chemical conjugation to peptides, peptidomimetics, and other synthetic molecules. Reactive groups (thiol, amine) are inserted in precisely-defined positions via introduction of cysteine or lysine residues into XTEN-encoding genes. Amunix has developed XTENs containing 1 to 9 thiol groups with various spacing which can be provided to partners. Thus, in the present invention, orthogonal conjugation to amino and thiol groups in XTEN facilitates the production of Klotho-XTEN molecules.

### Purification of Proteins

[0300] The Klotho protein can be extracted from cell suspension culture of cells (e.g., of a CHO cell line). The cells can produce and optionally secrete the Klotho protein (e.g., into liquid medium). Secretion of S-klotho into the spent media was also observed.

[0301] Purification of the recombinant proteins of the present disclosure can be carried out by any suitable method known in the art or described herein, for example, any conventional procedures involving extraction, precipitation, chromatography and/or electrophoresis. A further purification procedure that can be used for purifying proteins includes affinity chromatography using monoclonal antibodies which bind to target protein(s). Some embodiments can include an IgG-tagged protein, Fc-tagged protein, His-tagged protein, HSA-tagged protein, GST-tagged protein, etc., that can be purified by affinity chromatography. For instance, some embodiments can include at least a portion of an Fc domain of an IgG, such as IgG1. Generally, crude preparations containing a recombinant protein are passed through a column on which a suitable monoclonal antibody is immobilized. For other tags, a corresponding, tag-binding affinity entity can be disposed in the column. After washing the column, the protein is eluted from the gel by changing pH or ionic strength. For example, the spent media from the CHO-S high producer cell lines were concentrated via tangential flow filtration; and S-klotho protein was purified by affinity chromatography followed by ion exchange cartridge or column chromatography. Size exclusion chromatography can also be used to purify the proteins. It will be appreciated that various ordering of chromatography types can be applied. Any suitable combination of chromatography steps or columns is contemplated herein.

[0302] In alternative protocols, one or more pre- or post-affinity purification steps were performed. Such steps can include, for example, (ultra) centrifugation, dialysis, membrane and/or tangential flow filtration, chromatographic separation, such as ion exchange, liquid-liquid extraction, such as (aqueous) two-phase extraction, or other known purification steps. One or more post purification processing steps were performed in certain embodiments. Such post purification processing steps can include, for example, tandem anion/cation flow-through chromatography (as opposed to bind-and-elute chromatography), viral and/or bacterial removal by membrane filtration (e.g., 0.2 micron, 0.1 micron, etc.) or by other means known to one of ordinary skill in the art.

[0303] Certain embodiments include a method of purifying a recombinant Klotho protein. The method can include expressing the recombinant Klotho protein in suspension cell culture. The method can include harvesting the Klotho protein, such as by collecting suspension culture medium and/or cells. In at least one embodiment, the method can include a first purification step. It will be appreciated that the “first” purification step need not occur first or prior to any other purification step(s), or after any other purification step(s). The first purification step can comprise, involve, or use chromatography, such as High Performance Liquid Chromatography (HPLC), Fast Protein Liquid Chromatography (FPLC), ion exchange chromatography, affinity chromatography, etc. The first purification step can comprise, involve, or use affinity chromatography. The affinity chromatography can be based on a tag or other protein fusion entity of the Klotho protein. For example, a His-tagged protein can be purified by His-tag affininty chromatography (e.g., HisTrap or nickel column chromatography). Similarly, a GST-conjugated protein can be purified by GST-affinity chromatography. Depending on the specific tag(s), a corresponding, tag-binding affinity entity can be disposed in a chromatography column for use in protein purification.

[0304] In at least one embodiment, the first purification step can comprise, involve, or use affinity chromatography using, for example, Protein A or Protein A-conjugated particles or beads (e.g., Protein A Sepharose 4 Fast Flow column (0.75 ml) (0.5 cm×3 cm) for purification of Ig-tagged or Fc-fusion Klotho proteins. The column can be equilibrated in an appropriate solution. The solution can include a buffering agent at a suitable concentration (e.g., 10 mM Tris-HC1, pH 8.0). A suitable amount of protein-containing sample (e.g., suspension cell culture supernatant, optionally adjusted to pH 8.0, with 1.5 M Tris-HC1, pH 8.0) can be loaded on to the column (e.g., at a flow rate of 0.75 ml/min), optionally washed with a suitable wash buffer (e.g., 10 mM Tris/Arginine-HC1, pH 8.0), and eluted from the column with a suitable elution buffer (e.g., 4 M MgCl₂, pH 3 (i.e., low pH, high salt)), at a suitable flow rate (e.g., about 0.50-0.25 ml/min, or equivalent), and/or to produce a concentrated sample.

[0305] In at least one embodiment, the elution buffer can have a pH of about 3. In some embodiments, the elution buffer can have a pH between about pH 2 and about pH 6, preferably between about pH 2 and about pH 5, more preferably between about pH 2 and about pH 4, still more preferably between about pH 2.5 and about pH 3.5.

[0306] In at least one embodiment, the elution buffer can include at least one salt. Illustratively, the salt can be or comprise MgCl₂, preferably at a concentration of about 4 M. In some embodiments, the elution buffer can have a salt concentration between about 1 M and about 6 M, preferably between about 2 M and about 5 M, more preferably between about 3 M and about 5 M, still more preferably between about 3.5 M and about 4.5 M.

[0307] Additional purification step(s) can comprise, involve, or use chromatography, such as High Performance Liquid Chromatography (HPLC), Fast Protein Liquid Chromatography (FPLC), ion exchange chromatography, affinity chromatography, size exclusion (or gel filtration) chromatography, etc. In at least one embodiment, the method can include a second purification step. It will be appreciated that the “second” purification step need not occur second, prior to, or before any other purification step(s). The second purification step can comprise, involve, or use size exclusion chromatography (and a suitable mobile phase buffer) to fractionate, resolve, clarify, or purify the protein-containing sample(s). For example, in an illustrative second purification step, protein-containing elution sample(s) (from the first purification step) can be optionally buffer exchanged, and purified using size exclusion chromatography (e.g., Superdex 200 (1 cm×30 cm) column) in a suitable mobile phase buffer. In at least one embodiment, the mobile phase buffer can include a suitable buffering agent (e.g., 100 mM Tris-HCl) and one or more optional reducing agent (e.g., 5 mM L-Methionine and/or 0.6% Sodium Thioglycolate), at a suitable pH (e.g., about pH 8). In at least one embodiment, the buffering agent can be other than a phosphate-containing buffer (e.g., Tris, Citrate, etc.). In at least one embodiment, the reducing agent can be or comprise L-Methionine and/or Sodium Thioglycolate, preferably at effective reducing concentration(s). Alternative reducing agents may include an acetylcysteine (i.e., N-acetylcysteine (NAC), including N-acetyl-L-cysteine, N-acetyl-D-cysteine, and racemic N-acetylcysteine or a (racemic) mixture of N-acetyl-L-cysteine and N-acetyl-D-cysteine), ascorbic acid, dithionite, erythiorbate, cysteine, glutathione, dithiothreitol, 2-mercaptoethanol, dierythritol, a resin-supported thiol, a resin-supported phosphine, vitamin E, and/or trolox, or salts thereof, sodium citrate, potassium citrate, potassium iodide, ammonium chloride, guaiphenesin (or guaifenesin), Tolu balsam, Vasaka, ambroxol, carbocisteine, erdosteine, mecysteine, dornase alfa, and so forth.

[0308] In at least one embodiment, the mobile phase buffer can have a pH of about 8. In some embodiments, the elution buffer can have a pH between about pH 6 and about pH 10, preferably between about pH 7 and about pH 9, more preferably between about pH 7.2 and about pH 8.8, still more preferably between about pH 7.5 and about pH 8.5.

[0309] In at least one embodiment, the eluted protein can be or include monomeric Klotho protein. In at least one embodiment, the eluted protein can be or include multimeric Klotho protein. In some embodiments, the eluted protein can be or include dimeric Klotho protein. In some embodiments, the eluted protein can be or include tetrameric Klotho protein. In some embodiments, the eluted protein can be or include hexameric Klotho protein. In some embodiments, the eluted protein can be or include octameric Klotho protein. In at least one embodiment, the eluted protein can be or include both monomeric and multimeric Klotho proteins. In at least one embodiment, the eluted protein can be or include a single species of either monomeric or multimeric Klotho protein. In at least one embodiment, the eluted protein can be or include greater than or equal to about 80% of the single species of either monomeric or multimeric Klotho protein. In at least one embodiment, the eluted protein can be or include greater than or equal to about 82%, 85%, 88%, 90%, 92%, 95%, 96%, 97%, 98%, or 99% of the single species of either monomeric or multimeric Klotho protein.

[0310] Additional purification step(s) can comprise, involve, or use chromatography, such as High Performance Liquid Chromatography (HPLC), Fast Protein Liquid Chromatography (FPLC), ion exchange chromatography, affinity chromatography, size exclusion (or gel filtration) chromatography, etc.

Analysis of Klotho proteins

[0311] Protein purity can be demonstrated by SDS-PAGE or other assays or means known in the art. For instance, in at least one embodiment, Klotho protein samples (50 μg) were fractionated on precast SDS-PAGE gels (4-15%, 10 wells; catalog no. 456-1083; BioRad) and stained with Coomassie blue stain. All samples were run with either an empty lane in between or on separate gels to avoid sample-to-sample contamination. S-klotho of greater than 98% was shown to be isolated from the CHO S conditioned media as determined by Coomaise blue stain and densitometry tracing, or by silver stain visualization, or by HPLC or RP-HPLC. In order to obtain sequence information, the proteins (after reduction and S-carboxymethylation) can be cleaved with cyanogen bromide, trypsin, and/or proteinase K and the peptides separated by HPLC according to known methods of protein chemistry. Thus—prepared samples were then sequenced in an automatic gas phase microsequencing apparatus (Applied Biosystems Model 470A, ABI, Foster City, Calif., USA) with an on-line automatic HPLC PTH amino acid analyzer (Applied Biosystems Model 120, ABI see above) connected to the outlet.

[0312] Proteins were also analyzed through mass spectroscopic methods. Concerning sample preparation for mass spectrometry, in order to restrict analyses to the correct S-klotho protein, only the gel band between 75 and 150 kDa was resected for analysis. Gel fractions were macerated with a sterile blade and subjected to in-gel digestion. Gel fractions were de-stained by three washes with 80 μL of 50% acetonitrile (ACN)/50 mM ammonium hydrogen carbonate and washed with 100% ACN. The alkylation step was omitted, given the absence of cysteine residues from the target α-Klotho peptides. Tryptic digestion was carried out overnight at 37° C. with 60 μL of trypsin (sequencing grade modified, catalog no. V511A; Promega) in 50 mM ammonium hydrogen carbonate (0.005 μg/pL). This process yielded 25 μL, of which 5 μL (1 μL for S-Klotho) was subjected to liquid chromatography-electrospray ionization tandem mass spectrometry (MS/MS) and PRM analysis in an Orbitrap nano-ESI Q-Exactive mass spectrometer (Thermo Scientific), coupled to a nanoLC (Dionex Ultimate 3000 UHPLC). MS/MS analysis confirmed that the human recombinant alpha S-klotho produced by embodiments of the present disclosure was substantially similar (e.g., identical in corresponding amino acid sequence) to that found in human blood, serum, urine or cerebrospinal fluid.

[0313] Using the above purification methods, the level of contaminating CHO host cell proteins (HCP) was determined to be acceptable in the purified S-Klotho protein. In the final S-Klotho product, HCP was removed to <1-100 ppm. S-klotho protein products of at least 90%, and up to 98% purity were isolated from the spent CHO S production cell line (cells and/or liquid medium). Specifically, cGMP-grade human alpha S-klotho that had an analytical profile suitable for clinical administration in human subjects was produced and purified. For example, the analytical profile of human recombinant alpha S-Klotho is designated by reference number PXD002775 in the ProteomeXchange Database, which can be found at http://proteomecentral.proteomexchange.org/cgi/GetDataset?ID=PXDO02775. The NIH full S-Klotho protein dataset is at http://www[dot]ncbi[dot]nlm[dot]nih[dot]gov/protein/Q9UEF7.

[0314] An analytical profile for S-Klotho suitable for clinical administration and that obtained in an embodiment of the present disclosure included an endotoxin level less than 0.1 ng per pg (1 EU/μg) of S-Klotho. In addition, the purified human recombinant S-Klotho was also shown to have >or =98% purity by SDS PAGE.

[0315] Glycan structures present on the CHO S cell-produced S-Klotho were identical in comparison to the structures on native S-Klotho isolated from human fluids (i.e., blood, serum, urine, and cerebrospinal fluid). This ensured that the same, native post-translation modifications (PTMs) were produced and stably maintained in the cell produced S-Klotho protein. Accordingly, using production and purification method described herein, the Inventors have been successful in producing cGMP-grade human S-klotho that had an analytical profile suitable for clinical administration in human subjects.

### Therapeutic Compositions

[0316] Some embodiments of the present disclosure can include a pharmaceutical composition, such as a therapeutic composition. Pharmaceutical compositions of the present disclosure can generally include a therapeutically effective amount of a recombinant soluble alpha Klotho protein admixture with a (pharmaceutically-acceptable) vehicle, carrier, or excipient comprised of one or more additional components. The Klotho protein can be included in any suitable amount, such as about 0.001-1000 mg, about 0.01-100 mg, about 0.1-10 mg, about 1-5 mg, or any amount or range of amounts therebetween. In some embodiments, the composition can include a pharmaceutically or therapeutically effect amount of Klotho protein (e.g., to raise serum Klotho levels to a predetermined level in a subject to which the composition is administered).

[0317] The components can include one or more aggregation inhibitors, buffers, tonicity modifiers, and additional excipients. The primary solvent in the carrier can be either aqueous or non-aqueous in nature. The composition can be prepared by combining a purified Klotho protein of the present disclosure with a pharmaceutically-acceptable carrier.

[0318] It will be understood by one of ordinary skill in the art that the combining of the various components to be included in the composition can be done in any appropriate order, namely, the buffer can be added first, middle or last and the tonicity modifier can also be added first, middle or last. It is also to be understood by one of ordinary skill in the art that some of these chemicals can be incompatible in certain combinations, and accordingly, are easily substituted with different chemicals that have similar properties but are compatible in the relevant mixture.

[0319] Aggregation inhibitors reduce a polypeptide's tendency to associate in inappropriate or unwanted ternary or quaternary complexes. The amino acids L-arginine and/or, L-cysteine, can act to reduce aggregation of Fc domain containing polypeptides in a formulation for long periods, e.g., two years or more. The concentration of the aggregation inhibitor in the formulation is preferably between about 1 mM to 1 M, more preferably about 10 mM to about 200 mM, more preferably about 10 mM to about 100 mM, even more preferably about 15 mM to about 75 mM, and yet more preferably about 25 mM. These compounds are available from commercial suppliers.

[0320] Compositions of the present disclosure can include a buffering agent. Buffering agents maintain pH in a desired range. Various buffers suitable for use in the pharmaceutical composition of the present disclosure include histidine, potassium phosphate, alkali salts, sodium or potassium phosphate or their hydrogen or dihydrogen salts, sodium citrate or potassium citrate /citric acid, sodium acetate/acetic acid, maleic acid, ammonium acetate, tris-(hydroxymethyl)-aminomethane (tris), various forms of acetate and diethanolamine, and any other pharmaceutically acceptable pH buffering agent known in the art, to maintain the pH of the solution within a desired range. Mixtures of these buffering agents may also be used.

[0321] The amount of buffering agent useful in the composition depends largely on the particular buffer used and the pH of the solution. For example, acetate is a more efficient buffer at pH 5 than pH 6 so less acetate may be used in a solution at pH 5 than at pH 6. The preferred pH of the preferred formulations will be in the range of 4.0 to 5.0, and pH-adjusting agents such as hydrochloric acid, citric acid, sodium hydroxide, or a salt thereof, may also be included in order to obtain the desired pH.

[0322] One preferred buffer is sodium phosphate as its buffering capacity is at or near pH 6.2. It will be appreciated, however, that other buffers may be selected to achieve any desirable pH buffering. The concentration of the buffer in the formulation is preferably between about 1 mM to about 1 M, more preferably about 10 mM to about 200 mM. Buffers are well known in the art and are manufactured by known methods and available from commercial suppliers.

[0323] When the pH of the pharmaceutical composition is set at or near physiological levels comfort of the patient upon administration is maximized In particular, it is preferred that the pH be within a range of pH about 5.8 to 8.4, with about 6.2 to 7.4 being preferred, however, it is to be understood that the pH can be adjusted as necessary to maximize stability and solubility of the polypeptide in a particular formulation and as such, a pH outside of physiological ranges, yet tolerable to the patient, is within the scope of the disclosure.

[0324] The formulations of the present disclosure may further include one or more tonicity modifiers (e.g., to render the solution isotonic with a patient's blood for injection). A tonicity modifier is understood to be a molecule that contributes to the osmolality of a solution. The osmolality of a pharmaceutical composition is preferably regulated in order to maximize the active ingredient's stability and also to minimize discomfort to the patient upon administration. Where serum is approximately 300+/−50 milliosmoles per kilogram. It is generally preferred that a pharmaceutical composition be isotonic with serum, i.e., having the same or similar osmolality, which is achieved by addition of a tonicity modifier, thus it is contemplated that the osmolality can be from about 180 to about 420 milliosmoles, however, it is to be understood that the osmolality can be either higher or lower as specific conditions require.

[0325] Typical tonicity modifiers are well known in the art and include but are not limited to various salts, amino acids or polysaccharides. Non-limiting examples of suitable amino acids include glycine. Non-limiting examples of suitable polysaccharides include sucrose, mannitol and sorbitol. It is understood that more than one tonicity modifier may be used at once, for example, sorbitol and glycine can be used in combination to modify a formulation's tonicity.

[0326] Additional examples of tonicity modifiers suitable for modifying osmolality include, but are not limited to amino acids (e.g., arginine, cysteine, histidine and glycine), salts (e.g., sodium chloride, potassium chloride and sodium citrate) and/or saccharides (e.g., sucrose, glucose and mannitol). The concentration of the tonicity modifier in the formulation is preferably between about 1 mM to 1 M, more preferably about 10 mM to about 200 mM. Tonicity modifiers are well known in the art and are manufactured by known methods and available from commercial suppliers.

[0327] Excipients, also referred to as chemical additives, co-solutes, or co-solvents, that stabilize the polypeptide while in solution (also in dried or frozen forms) can also be added to a pharmaceutical composition. Excipient is defined herein as a non-therapeutic agent added to a pharmaceutical composition to provide a desired effect, e.g. stabilization, isotonicity. Common attributes of desirable excipients are aqueous solubility, non-toxicity, non-reactivity, rapid clearance from the body, and the absence of immunogenicity. In addition, the excipients should be capable of stabilizing the native conformation of the protein so as to maintain the efficacy and safety of the drug during processing, storage and administration to the patient. Examples include but are not limited to sugars/polyols such as: sucrose, lactose, glycerol, xylitol, sorbitol, mannitol, maltose, inositol, trehalose, glucose; polymers such as: serum albumin (bovine serum albumin (BSA), human SA or recombinant HA), dextran, PVA, hydroxypropyl methylcellulose (HPMC), polyethyleneimine, gelatin, polyvinylpyrrolidone (PVP), hydroxyethylcellulose (HEC); non-aqueous solvents such as: polyhydric alcohols, (e.g., PEG, ethylene glycol and glycerol) dimethylsulfoxide (DMSO) and dimethylformamide (DMF); amino acids such as: proline, L-serine, sodium glutamic acid, alanine, glycine, lysine hydrochloride, sarcosine and gamma-aminobutyric acid; surfactants such as: Tween-80™ (polysorbate 80), Tween-20™ (polysorbate 20), SDS, polysorbate, polyoxyethylene copolymer; and miscellaneous excipients such as: potassium phosphate, sodium acetate, ammonium sulfate, magnesium sulfate, sodium sulfate, trimethylamine N-oxide, betaine, metal ions (e.g., zinc, copper, calcium, manganese, and magnesium), CHAPS, monolaurate, 2-O-beta-mannoglycerate or any combination of the above. As a matter of caution, it is noted that the highly toxic white hellebore (Veratrum album) can be mistaken for gentian.

[0328] The concentration of one or more excipients in a formulation of the disclosure is/are preferably between about 0.001 to 5 weight percent, more preferably about 0.1 to 2 weight percent. Excipients are well known in the art and are manufactured by known methods and available from commercial suppliers.

[0329] In one illustrative embodiment, a formulation of the disclosure can comprise about 150 mM NaCl buffered to pH 7.3 to 7.4 with HEPES, MES, or Tris-HCl, and, optionally, one or more additional components as described herein.

[0330] In one illustrative embodiment, a formulation of the disclosure can comprise a (therapeutically-effective) amount of Klotho protein in about 10 mM to about 100 mM L-arginine, about 10 mM to about 50 mM sodium phosphate, about 0.75% to about 1.25% sucrose, and/or about 50 mM to about 150 mM NaCl, at about pH 6.0 to about pH 7.0. In another embodiment, L-arginine can be replaced with L-cysteine (at about 1 to about 500 micromolar) in the formulation. In yet another embodiment, the pH can be about pH 7.0. In another specific embodiment, a formulation of the disclosure can comprise a (therapeutically-effective) amount of Klotho protein in about 25 mM L-arginine, about 25 mM sodium phosphate, about 98 mM sodium chloride, and/or about 1% sucrose at about pH 6.2.

[0331] In another embodiment, a formulation of the disclosure can comprise a (therapeutically-effective) amount of Klotho protein in about 10 mM to about 100 mM L-arginine, about 10 mM to about 50 mM sodium phosphate, about 0.75% to about 1.25% sucrose, about 50 mM to about 150 mM NaCl, at about pH 6 to about pH 7. In a specific embodiment, the formulation of the disclosure comprises a (therapeutically-effective) amount of Klotho protein in about 25 mM sodium phosphate, about 98 mM sodium chloride, and/or about 1% sucrose at about pH 6.2.

[0332] In yet another embodiment, a formulation of the disclosure can comprise an effective amount of an Fc domain containing Klotho fusion protein, about 10 mM to about 100 mM L -arginine, about 10 mM to about 50 mM sodium phosphate, about 0 to 5% Mannitol and/or 0 to 0.2% Tween-20™ (polysorbate 20) at about pH 6 to 7. In another embodiment, a formulation of the disclosure can comprise an effective amount of a Klotho protein, about 25 mM L-arginine, about 25 mM sodium phosphate, about 4% Mannitol, about 0.02% Tween-20™ (polysorbate 20), and/or at about pH 6.0.

[0333] In yet another embodiment, the disclosure provides a method of treating a mammal comprising administering a therapeutically effective amount of the pharmaceutical composition described herein, wherein the mammal has a disease or disorder that can be beneficially treated with a Fc domain containing polypeptide in the composition. In yet another embodiment, the Fc domain containing polypeptide is derived from the same species of mammal as is to be treated with the composition. In a particular embodiment, the mammal is a human patient in need of treatment. When the Fc domain containing polypeptide of the composition is Klotho:Fc, examples of diseases or disorders that can be treated include but are not limited to rheumatoid arthritis, psoriatic arthritis, ankylosing spondylitis, Wegener's disease (granulomatosis), Crohn's disease (or inflammatory bowel disease), chronic obstructive pulmonary disease (COPD), Hepatitis C, endometriosis, asthma, cachexia, psoriasis, and atopic dermatitis, or persons with a genetic disorder with mutations in one or more Klotho genes. Additional diseases or disorders that can be treated with Klotho:Fc include those described in WO 00/62790, WO 01/62272 and U.S. Patent Application No. 2001/0021380, the entirety of each of which is incorporated herein by reference.

[0334] In yet another embodiment, the disclosure provides a method for accelerated stability testing of the stability an Fc domain containing polypeptide in a pharmaceutical composition of the disclosure comprising the steps of testing the activity of the polypeptide formulated according to the disclosure prior to storage, i.e., time zero, storing the composition at 37° C. for one month and measuring the stability of the polypeptide, and comparing the stability form time zero to the one month time point. This information is helpful for early elimination of batches or lots that appear to have good stability initially, yet do not store well for longer periods.

[0335] Moreover, the pharmaceutical composition provides long-term storage such that the active ingredient, e.g., an Fc domain containing polypeptide, is stable over the course of storage either in liquid or frozen states. As used herein, the phrase “long-term” storage is understood to mean that the pharmaceutical composition can be stored for three months or more, for six months or more, for one year or more, and preferably for two year or more. Long term storage is also understood to mean that the pharmaceutical composition is stored either as a liquid at 2-8° C. or is frozen, e.g., at −20° C. or colder (e.g., −20 ° C. or −80° C.). It is also contemplated that the composition can be frozen and thawed more than once. The term “stable” with respect to long-term storage is understood to mean that the active polypeptide of the pharmaceutical composition does not lose more than 20%, or more preferably 15%, or even more preferably 10%, and most preferably 5% of its activity relative to activity of the composition at the beginning of storage.

[0336] One or more anti-oxidants can be included in the formulations of the present disclosure. Anti-oxidants contemplated for use in the preparation of the formulations include amino acids such as glycine and lysine, chelating agents such as EDTA and DTPA, and free-radical scavengers such as sorbitol and mannitol.

[0337] Other effective administration forms such as (an oral or parenteral) modified release formulations (e.g., coated, encapsulated, slow-release, controlled-release, extended-release, delayed-release, sustained-release, time-release, depot, etc.), inhalant mists, orally-active formulations, suppositories, and implants or implantable medical devices are also contemplated herein. As such, the formulations may also involve particulate preparations of polymeric compounds such as bulk erosion polymers (e.g., poly(lactic-co-glycolic acid) (PLGA) copolymers, PLGA polymer blends, block copolymers of PEG, and lactic and glycolic acid, poly(cyanoacrylates)); surface erosion polymers (e.g., poly(anhydrides) and poly(ortho esters)); hydrogel esters (e.g., pluronic polyols, poly(vinyl alcohol), poly(vinylpyrrolidone), maleic anhydride-alkyl vinyl ether copolymers, cellulose, hyaluronic acid derivatives, alginate, collagen, gelatin, albumin, and starches and dextrans) and composition systems thereof; or preparations of liposomes or microspheres. Such formulations may influence the physical state, stability, rate of in vivo release, and rate of in vivo clearance of the present proteins and derivatives. The optimal pharmaceutical formulation for a desired protein can be determined by one skilled in the art depending upon the route of administration and desired dosage. Exemplary pharmaceutical formulations are disclosed in Remington's Pharmaceutical Sciences, 18th Ed. (1990), Mack Publishing Co., Easton, Pa. 18042, pages 1435-1712, the disclosure of which is incorporated herein by reference.

### Biological Activity

[0338] Methods for evaluating the efficacy and/or determining an effective dose of human recombinant alpha soluble Klotho (to a patient, subject, or individual exhibiting an age-related disorder or clinical (e.g., metabolic) disorder) can (preliminarily) include performing organismal-based assays (e.g., using a mammal (e.g., a mouse, rat, primate, or some other non-human). The Klotho protein can be administered to the organism once or as a regimen (regular or irregular). For instance, the protein can be administered a suitable number of times (e.g., once, twice, etc.) in a given period of time (e.g., monthly, semi-monthly, weekly, semi-weekly, daily, etc.). A parameter of the organism (e.g., an age-associated parameter) can then be evaluated. Klotho proteins of interest can effectuate or result in a change in the parameter relative to a reference (e.g., a parameter of a control organism). Other parameters (e.g., related to toxicity, clearance, and pharmacokinetics) can also be evaluated.

[0339] The klotho proteins of the present disclosure may be evaluated using an animal (model) that has or exhibits a particular disorder or condition, such as an age-related or age-associated disorder or condition, a clinical (e.g., metabolic) disorder or condition, etc. Such disorders and conditions can also provide a sensitized system in which the effect of the protein on physiology can be observed. Exemplary disorders include, for example, denervation, disuse atrophy, clinical (e.g., metabolic) disorders (e.g., disorder of obese and/or diabetic animals such as db/db mouse, ob/ob mouse, etc.), cerebral disorders, liver ischemia or other liver disorders, cisplatin/taxolkincristine models, kidney idschemia/reperfusion models, various tissue (xenograft) transplants, transgenic bone models, pain syndromes (e.g., inflammatory and neuropathic disorders), Paraquat, genotoxic, oxidative stress models, and tumor (I) models.

[0340] To evaluate the S-Klotho protein of the present disclosure, the protein can be administered to a suitable animal (for a suitable treatment period) and the parameter of the animal is evaluated (e.g., after a suitable period of time, such as 10 to 60 minutes, 1 to 24 hours, 1 to 30 days, 1 to 12 months, 1 to 5 years, or any value or range of values therebetween). The animal can be fed ad libitum or normally (e.g., not under caloric restriction, although some parameters can be evaluated under such conditions). Typically, a cohort of such animals is used for the assay. Generally, a test polypeptide can be indicated as favorably altering lifespan regulation in the animal if the test polypeptide affects the parameter in the direction of the phenotype of a similar animal subject to caloric restriction. Such test polypeptides may cause at least some of the lifespan regulatory effects of caloric restriction (e.g., a subset of such effects) without having to deprive the organism of caloric intake.

[0341] The parameter(s) to be tested may be age-associated or disease associated parameter(s) (e.g., a symptom of the disorder associated with the animal model). A test protein that is favorably indicated can cause an amelioration of the symptom relative to a similar reference animal not treated with the polypeptide. Other parameters relevant to a disorder or to aging can include: antioxidant levels (e.g. antioxidant enzyme levels or activity), stress resistance (e.g., paraquat resistance), core body temperature, glucose levels, insulin levels, thyroid-stimulating hormone levels, prolactin levels, and luteinizing hormone levels.

[0342] To measure the effectiveness of the S-Klotho protein of the present disclosure for treating an age-related disorder, an animal having decreased Klotho expression may be used (e.g., a mouse with a mutant or deleted klotho gene). For example, the test protein can be administered to the mutant mouse and age-related parameters are monitored. A test protein that is favorably indicated can cause an amelioration of the symptom relative to a similar reference animal not treated with the protein.

[0343] A parameter relevant to a clinical (e.g., metabolic) disorder or to aging can be assessed by measurement of body weight, examination on the acquisition of reproductive ability, measurement of blood sugar level, observation of life span, observation of skin, observation of motor functions such as walking, and the like. The assessment can also be made by measurement of thymus weight, observation of the size of calcified nodules formed on the inner surface of thoracic cavity, and the like. Further, quantitative determination of mRNA for the klotho gene or the Klotho protein can also be useful for the assessment.

[0344] Still other (in vivo) models and organismal assays include evaluating an animal for a clinical (e.g., metabolic) parameter, e.g., a parameter relevant to an insulin disorder, type II diabetes. Exemplary metabolic parameters include: glucose concentration, insulin concentration, and insulin sensitivity.

[0345] In assessing whether a test protein is capable of altering life span regulation, a number of age-associated parameters or biomarkers can be monitored or evaluated. Exemplary age associated parameters include: (i) lifespan of the cell or the organism; (ii) presence or abundance of a gene transcript or gene product in the cell or organism that has a biological age-dependent expression pattern; (iii) resistance of the cell or organism to stress; (iv) one or more metabolic parameters of the cell or organism (exemplary parameters include circulating insulin levels, blood glucose levels; fat content; core body temperature and so forth); (v) proliferative capacity of the cell or a set of cells present in the organism; and (vi) physical appearance or behavior of the cell or organism.

[0346] The term “average lifespan” refers to the average of the age of death of a cohort of organisms. In some cases, the “average lifespan” is assessed using a cohort of genetically identical organisms under controlled environmental conditions. Deaths due to mishap are discarded. Where average lifespan cannot be determined (e.g., for humans) under controlled environmental conditions, reliable statistical information (e.g., from actuarial tables) for a sufficiently large population can be used as the average lifespan.

[0347] Characterization of molecular differences between two such organisms, e.g., one reference organism and one organism treated with a S-Klotho protein can reveal a difference in the physiological state of the organisms. The reference organism and the treated organism are typically the same (or substantially the same) chronological age and/or sex. The term “chronological age” as used herein refers to time elapsed since a preselected event, such as conception, a defined embryological or fetal stage, or, more preferably, birth. A variety of criteria can be used to determine whether organisms are of the “same” chronological age for the comparative analysis.

[0348] Typically, the degree of accuracy required is a function of the average lifespan of a wildtype organism. For example, for the nematode C. elegans, for which the laboratory wildtype strain N2 lives an average of about 16 days under some controlled conditions, organisms of the same age may have lived for the same number of days. For mice, organism of the same age may have lived for the same number of weeks or months; for primates or humans, the same number of years (or within 2, 3, or 5 years); and so forth. Generally, organisms of the same chronological age may have lived for an amount of time within 15, 10, 5, 3, 2 or 1% of the average lifespan of a wildtype organism of that species. Preferably, the organisms are adult organisms (e.g., the organisms have lived for at least an amount of time in which the average wildtype organism has matured to an age at which it is competent to reproduce).

[0349] The organismal screening assay can be performed before the organisms exhibit overt physical features of aging. For example, the organisms may be adults that have lived only 10, 30, 40, 50, 60, or 70% of the average lifespan of a wildtype organism of the same species. Age-associated changes in metabolism, immune competence, and chromosomal structure have been reported. Any of these changes can be evaluated, either in a test subject (e.g., for an organism based assay), or prior, during or after treatment with a therapeutic described herein (e.g., for a (human, or mammal) patient).

[0350] A marker associated with caloric restriction can also be evaluated in a subject organism of a screening assay (or a treated subject). Although these markers may not be age-associated, they may be indicative of a physiological state that is altered when a Klotho or Klotho-related pathway is modulated. The marker can be an mRNA or protein whose abundance changes in calorically restricted animals. Cellular models derived from cells of an animal described herein or analogous to an animal model described herein can be used for a cell-based assay.

[0351] Models for evaluating the effect of a test protein on muscle atrophy include: 1) rat medial gastrocnemius muscle mass loss resulting from denervation, e.g., by severing the right sciatic nerve at mid-thigh; 2) rat medial gastrocnemius muscle mass loss resulting from immobilization (e.g., by fixed the right ankle joint at 90 degrees of flexion); 3) rat medial gastrocnemius muscle mass loss resulting from hind limb suspension; 4) skeletal muscle atrophy resulting from treatment with the cachectic cytokine, interleukin-1 (IL-1); and 5) skeletal muscle atrophy resulting from treatment with the glucocorticoid, dexamethasone.

### Products, Compositions, Formulations, Supplements, Etc.

[0352] Some embodiments of the present disclosure relate to compositions configured or formulated to augment natural soluble alpha Klotho protein production and/or attenuate Klotho protein damage or degradation, and to methods, kits, formulations, combination products, co-administrations, co-formulations, dosages, process, methods, treatment protocols, and diagnostic methods related to the same. Some embodiments of the present disclosure relate to methods of manufacturing compositions of the present disclosure. Some embodiments of the present disclosure relate to use of compositions of the present disclosure or methods of using the same to treat human or non-human animal subjects. Some embodiments of the present disclosure relate to treatment methods involving compositions of the present disclosure, including administration thereof to human or non-human animal subjects. Such uses and treatment methods can increase endogenous Klotho protein levels, such as by augmenting natural soluble alpha Klotho protein production and/or attenuating Klotho protein damage or degradation.

[0353] Certain embodiments include compositions of matter that comprise a health supplement that, when administered to human or non-human animal (e.g., mammalian) subjects, increases the levels of endogenous, soluble alpha-Klotho protein in the human or non-human animal subjects. The composition or health supplement formulation can comprise (synthetic) chemical and/or natural components or ingredients. In other words, components or ingredients of the composition or health supplement can be or originate from (synthetic) chemical and/or natural sources.

[0354] An exemplary composition can comprise one or more components, preferably selected from the group consisting of, for example, Vitamin D3, Vitamin E, Vitamin C, Vitamin K, 3,5,4′-trihydroxy-trans-stilbene (Resveratrol), Pterostilbene, N-acetylcysteine (NAC), Troglitazone, Rosiglitazone, Notopterygium incisum Ting, Gentian (Root; Extract), Cordyceps (Cordyceps Sinensis (CS) Mycelium), Isoflavones (Soy), Genistein, Daidzein, Quercetin (dihydrate; dill, bay leaf, oregano), Docosahexaenoic acid (DHA), Astaxanthin, Sesamin (Semen Sesamin Nigrum (Black)), Sesame (Seed Extract), Rosmarinic acid (RA; (Marjoram)), Tetradecylthioacetic Acid (TTA), Dicalcium Phosphate (Anhydrous), Mircrocrystalline cellulose (MCC), Croscarmellose Sodium (Primellose), Stearing Acid, Magnesium Stearate, Alpha Lipoic Acid, Conjugate (alpha) Linoleic Acid (CLA), Probiotics, Activated Charcoal, and others as known in the art.

[0355] Certain ingredients or components can have positive benefits and very low side effects in treating or affecting one or more conditions that have been associated with cellular and tissue dysfunctions that occur with aging. Certain ingredients or components can (directly or indirectly) increase the circulating plasma level of soluble alpha Klotho (s-Klotho) levels in human or non-human animal subjects following administration thereof.

[0356] The following examples are illustrative only. The following examples illustrate various optional ingredients, components, method steps, etc. that may be useful in the practice of the embodiments of the present disclosure.

[0357] Embodiments of the present disclosure include formulations (compositions, co-administrations, etc.) of several components (or ingredients) that, individually, can have a potential for positive benefits and/or very low side effects in addressing, treating, affecting, and/or countering one or more conditions that have been associated with cellular and tissue dysfunctions and/or that can occur with aging.

[0358] Without being bound to any theory, some of the components or ingredients of the present disclosure may activate the promoter of the klotho gene (e.g., in the human HEK293/kl cell line), or reverse age-related declines in expression of Klotho in hepatic, kidney, and other tissues. Some of the components may attenuate, decrease, inhibit, and/or prevent oxidative or other damage to Klotho protein or the klotho gene.

[0359] Without being bound to any theory, some of the components have been shown by one or more animal and human clinical studies to have a potential for positive benefits and/or very low side effects in addressing, treating, affecting, and/or countering one or more conditions that have been associated with cellular and tissue dysfunctions and/or that can occur with aging. The present disclosure utilizes these various components in compositions and methods for increasing endogenous Klotho protein levels. Specifically, the present disclosure utilizes these various components in compositions configured or formulated to augment natural soluble alpha Klotho protein production and/or attenuate Klotho protein damage or degradation.

[0360] Without being bound to any theory, certain of the individual ingredients in some embodiments can increase the circulating plasma level of soluble alpha-Klotho in mammalian (e.g., human or non-human) animals. Example ingredients may include, but are not limited to: N-acetylcysteine (NAC), an antioxidant; D vitamins, such as Vitamin D3 (1,25-dihydroxyvitamin D3 [1,25(OH)2D3]); and/or vitamin D receptor agonist (e.g., calcitriol, paricalcitol), which are thought to increase Klotho expression, increase phosphaturia, correct hyperphosphatemia, and lower serum fibroblast growth factor-23 (FGF-23) resulting in associated decreasing aortic calcification in mice suffering from chronic kidney disease; and Vitamin C and/or Vitamin E, which are thought to ameliorate age-related crystalluria and kidney damage at the proximal tubule.

[0361] Further example ingredients may include, but are not limited to non-prescription ingredients that may supplement the anti-aging properties of alpha Klotho, such as, for example: docosahexaenoic acid (DHA), linoleic acid, conjugated linoleic acid (CLA), isoflavones (e.g., genistein, daidzein, quercetin), rosmarinic acid, sesamin and astaxanthin (food-derived antioxidants), and tetradecylthioacetic acid (TTA). Without being bound to any theory, the aging brain is particularly prone to inflammatory and oxidative alterations which may underlie decreases in learning and memory and omega-3 polyunsaturated fatty acids (PUFAs) such as DHA, protect the aging brain from the development of neurodegenerative diseases. Accordingly, certain formulaE can include alpha linoleic acid or conjugated alpha linoleic acid because alpha linoleic acid can serve as a precursor molecule used in the human body in the manufacture of DHA.

[0362] In at least one embodiment, one or more DHA precursors or omega-3 fatty acids, such as LA or CLA can be omitted from the formulation. Without being bound to any theory, omega-3 fatty acids such as LA or CLA may increase the effects of blood-thinning medications and raise the risk of bleeding. Example medications include, without limitation, warfarin (Coumadin), clopidogrel (Plavix), and aspirin, among others. In some embodiments, DHA can be included in the formulation. Without being bound to any theory, DHA may not directly cause blood thinning

[0363] Without being bound to any theory, mitochondrial damage can be the cause and outcome of cell injury resulting from a variety of toxic insults, hypoxia, or trauma. Increasing mitochondrial biogenesis after renal proximal tubular cell (RPTC) injury may accelerate the recovery of mitochondrial and cellular functions after such injury. Relevant to these observations, isoflavones, such as daidzein and genistein, may increase peroxisome proliferator-activated receptor gamma coactivator (PGC)-1 alpha expression and result in mitochondrial biogenesis as indicated by increased expression of ATP synthase beta and NADH:ubiquinone oxidoreductase core subunit 6 (ND6), which may result in a 1.5-fold increases in respiration and ATP in RPTC and which benefits recovery in injured RPTC. Without being bound to any theory, daidzein may be metabolized within the gut, by particular intestinal flora, to produce the bioactive compound equol. Equol can also be included in certain embodiments. The isoflavone, quercetin, on the other hand, may counter detrimental effects of aging by increasing oxidative stress resistance in the proteasome—large protein complexes responsible for the proper regulation of the cellular protein load that play a major role in the maintenance of redox balance by recognizing and removing oxidatively modified or damaged proteins.

[0364] Rosmarinic acid can also be added as an ingredient in some formulations. Rosmarinic acid (RA) is a naturally occurring phenolic compound, which may contribute to the beneficial and health-promoting effects of herbs, spices and medicinal plants. Administration of RA at a dosage of 200 mg per kg, once a day for 30 days to aging mice, can significantly (p<0.05 or p<0.01) increase the activity of superoxide dismutase (SOD) catalase (CAT) and glutathione peroxidase (GSH-Px), with a decrease in malondialdehyde (MDA), in comparison to an aging control that did not receive RA. Thus, RA may promote significant antioxidant enzyme activity in liver and kidney tissues of aging mice.

[0365] Some embodiments may also contain the food-derived antioxidants, such as astaxanthin (A) and/or sesamin (S). Without being bound to any theory, when both of these ingredients (astaxanthin is a red carotenoid found in salmon, shrimp, crab, and microalgae while sesamin is a major lignan found in sesame extract) were combined (i.e., AS) and administered daily to subjects with mild cognitive impairment (MCI), significant improvements in psychomotor speed and processing speed was observed in the AS group compared with a placebo group. Accordingly, daily supplementation of AS may improve cognitive functions related to the ability to comprehend and perform complex tasks quickly and accurately.

[0366] One or more peroxisome proliferator-activated receptor (PPAR-γ) agonists, such as Tetradecylthioacetic Acid (TTA), may also be added to certain embodiments. PPAR-γ agonists may have beneficial effects on heart muscle through the regulation of amino acids metabolism and L-carnitine biosynthesis.

[0367] In addition to the purified chemical compounds described above, some embodiments may contain one or more (e.g., several) natural ingredients or extracts. These include, but are not limited to, extracts of gentian root extract, Cordyceps mushroom, and Notopterygium incisum Ting.

[0368] Certain embodiments can include one or more (selective) strains of (probiotic) bacteria, such as: Lactobacillus sp. (e.g., acidophilus, brevis, bulgaricus, casei, gasseri, johnsonii, lactis, plantarum, paracasei, rhamnosus, salivarius, sake, etc.), Bifidobacterium sp. (e.g., bifidum, breve, infantis, lactis, longum, etc.), Streptococcus sp. (e.g., thermophiles, etc.), Bacillus sp. (e.g., laterosporus, etc.), Pediococcus sp. (e.g., acidilactici, etc.), and others as known in the art. Without being bound to any theory, probiotics may alleviate age-inflicted oxidative stress and improve expression of biomarkers of aging (e.g., in mice). Additional information regarding probiotics, which may be included in certain embodiments of the present disclosure, can be found in a literature by Sabina Fijan, “Microorganisms with Claimed Probiotic Properties: An Overview of Recent Literature,” published in Int J Environ Res Public Health, 2014 May; 11(5): 4745-4767, the entirety of which is incorporated herein by specific reference.

[0369] Table 42 provides a list of ingredients that can be formulated into a particular embodiment (designated KSF 101).

TABLE 42
KSF 101 Formulation

| Ingredient | Amount/Dose | |
|---|---|---|
| Vitamin D3 | 1,000 | IU |
| Vitamin E | 2,000 | IU |
| Vitamin C | 1000 | mg |
| Resveratrol | 1000 | mg |
| (3,5,4′-trihydroxy-trans-stilbene) | | |
| Pterostilbene | 5 | mg |
| NAC (N-acetylcysteine) | 600 | mg |
| Troglitazone | 1360 | mg |
| Rosiglitazone | 136 | mg |
| Notopterygium incisum Ting | 3000 | mg |
| Gentian Root Extract | 500 | mg |
| Cordyceps | 1000 | mg |
| Genistein | 10 | mg |
| Daidzein | 40 | mg |
| Quercetin | 150 | mg |
| Docosahexaenoic acid (DHA) | 1000 | mg |
| Astaxanthin | 3 | mg |
| Sesamin (S) | 5 | mg |
| Rosmarinic acid (RA) | 500 | mg |
| Tetradecylthioacetic Acid (TTA) | 500 | mg |
| Alpha Linoleic Acid | 3200 | mg |
| Conjugate Alpha Linoleic Acid (CLA) | 1000 | mg |
| Probiotics | 8 | g |
| Activated Charcoal | 5000 | mg |

[0370] By way of non-limiting example, the KSF 101 formulation can be or comprise an orally administered, DSHEA-compliant formulation or composition. Accordingly, in some instances, the KSF 101 supplement may be marketed and/or sold directly-to-consumer (DTC) and/or without requiring a prescription/physician order. It will be appreciated, however, that KSF 101 can be formulated in other dosage forms and/or as an FDA-approved drug without departing from the scope of this disclosure. The concentration of ingredients in KSF 101 are based on a standard adult reference of a 150-pound person (68 kilograms). Alternative dosage(s), as understood by those skilled in the art, are also contemplated herein.

[0371] Table 43 lists potential (e.g., preferred and optional) ingredients that can be formulated into another embodiment of the present disclosure.

TABLE 43
Illustrative Ingredients

| | |
|---|---|
| | (potential max.) |
| Ingredient | Amount/Dose |

Preferred Ingredients

| | | |
|---|---|---|
| Vitamin D3 | 1,000 | IU |
| Vitamin E | 2,000 | IU |
| Vitamin C | 1,250 | mg |
| Pterostilbene | 5 | mg |
| NAC (N-acetylcysteine) | 600 | mg |
| Notopterygium incisum Ting | 3,000 | mg |
| Gentian Root Extract | 500 | mg |
| Cordyceps | 1,000 | mg |

Optional or Alternative Ingredients

| | | |
|---|---|---|
| 2,3,5,4′-Tetrahydroxystilbene-2- | 4,000 | mg |
| O-β-D-glucoside (THSG) | | |
| Resveratrol | 1,000 | mg |
| (3,5,4′-trihydroxy-trans-stilbene) | | |
| Rosiglitazone | 136 | mg |
| Troglitazone | 1,360 | mg |
| Genistein | 10 | mg |
| Daidzein | 40 | mg |
| Quercetin | 500 | mg |
| (from dill, bay leaves, and oregano) | | |
| Isoflavones (Genistein, Daidzein, Equol) | 10 | mg |
| Docosahexaenoic acid (DHA) | 1,000 | mg |
| Astaxanthin | 3 | mg |
| Sesamin (S) | 200 | mg |
| Rosmarinic acid (RA) (marjoram) | 500 | mg |
| Tetradecylthioacetic Acid (TTA) | 500 | mg |
| Conjugate Linoleic Acid (CLA) | 3,200 | mg |
| Alpha Lipoic Acid (ALA) | 1000 | mg |
| Probiotics | 10-20 | billion CFU |
| Activated Charcoal | 5,000 | mg |
| Vitamin K | 90-120 | mcg |

[0372] Table 44 lists potential (e.g., preferred and optional) ingredients that can be formulated into another embodiment of the present disclosure.

TABLE 44

| | Label Claim | | | | Optimized | |
|---|---|---|---|---|---|---|
| Ingredient | mg | | Potency | mg/Tab | Amount/Day | |
| **9 TABLETS (excluding Probiotics and | | | | 1303.22 | | |
| Charcoal) | | | | | | |
| Vitamin D3 (100,000 Iu/Gm | 1000 | IU | | 1.22 | 1000 | IU |
| Vitamin E 1210 Iu (D-Alpha Tocopherol | 2000 | IU | | 202.02 | 2000 | IU |
| Succinate 1162 Iu | | | | | | |
| Vitamin C 97% (Ascorbic Acid) Granular | 1250 | mg | 97% | 157.5 | 1000 | mg |
| Pterostilbene Powder | 5 | mg | | 0.58 | 5 | mg |
| N-Acetyl L-Cysteine (NAC) | 600 | mg | | 70 | 600 | mg |
| Notopterygium Incisum Ting | 3000 | mg | | 350 | 0 | |
| Gentian Root 10:1 (Powder) | 500 | mg | | 58.33 | 500 | mg |
| Cordyceps Sinensis (CS) Mycelium Powder | 1000 | mg | | 116.67 | 0 to 300 | mg |
| Soy Isoflavones 40% | 10 | mg | 40% | 2.92 | 10 | mg |
| Dha Powder 17% from Algae | 170 | mg | 17% | 116.67 | 170 | mg |
| Semen Sesamin Nigrum (Black) Powder | 200 | mg | | 23.33 | 100-150 | mg |
| Quercetin From Dill, Bay Leaves and | 500 | mg | 98% | 59.52 | 150 | mg |
| Oregano | | | | | | |
| Rosmarinic Acid (RA)(Marjoram) | 500 | mg | | 58.33 | 500 | mg |
| Tetradecylthioacetic acid (TTA) | 500 | mg | | 58.33 | 500 | mg |

| Dicalcium Phosphate Anhydrous Powder | 5.56 | | |
|---|---|---|---|
| Mcc (Mircrocrystalline Cellulose) Ph 102 | 5.56 | | |
| Stearing Acid Nf | 5.56 | | |
| Croscarmellose Sodium (Primellose) | 5.56 | | |
| Magnesium Stearate | 5.56 | | |
| Probiotics | | 0 | |
| Charcoal (organic coconut) | | 260 | mg |

[0373] The ingredients of Tables 42-44 can be optionally combined in any suitable combination. By way of non-limiting example, the alternative formulation(s) can be or comprise an orally administered, DSHEA-compliant formulation or composition. It will be appreciated, however, that alternative formulation(s) can be formulated in other dosage forms and/or as an FDA-approved drug without departing from the scope of this disclosure. The respective concentrations of ingredients in the alternative formulation(s) are based on a standard adult reference of a 150-pound person (68 kilograms). Alternative dosage(s), as understood by those skilled in the art, are also contemplated herein.

[0374] An illustrative composition (e.g., a nutraceutical composition) can comprise two or more components selected from the group consisting of vitamin C, vitamin D3, vitamin E, N-acetylcysteine (NAC), quercetin (dihydrate), rosmarinic acid (RA), pterostilbene, docosahexaenoic acid (DHA), nicotinamide riboside (NR), nicotinamide adenine dinucleotide (NAD+), nicotinamide mononucleotide (NMN), and one or more probiotic. The one or more probiotic can include an effective amount of one or more of: (i) one or more Bifidobacterium species and/or strains selected from Bifidobacterium lactis BL-04, Bifidobacterium bifidum/lactis BB-02, and Bifidobacterium longum BL-05, and/or (ii) one or more Lactobacillus species and/or strains selected from Lactobacillus acidophilus LA-14, Lactobacillus rhamnosus LR-32, and Lactobacillus paracasei LPC-37.

[0375] Illustratively, the composition (or formulation) includes up to, at least, and/or about 50 billion CFU (per daily dose) of a Probiotic ingredient. Alternative embodiments can include up to, at least, between, and/or about 20 billion CFU (per daily dose), 30 billion CFU (per daily dose), 40 billion CFU (per daily dose), 60 billion CFU (per daily dose), 70 billion CFU (per daily dose), and/or 80 billion CFU (per daily dose) of the Probiotic ingredient. Illustratively, the Probiotic ingredient can comprise or include a single probiotic (bacterial) species or strain, or up to, at least, and/or between 2, 3, 4, 5, 6, 7, 8, 9, and 10 probiotic (bacterial) species or strains. In at least one embodiment, the Probiotic ingredient comprises the following probiotic (bacterial) species or strains: 30 billion CFU/day each of the Bifidobacterium species and/or strains Bifidobacterium lactis BL-04, Bifidobacterium bifidum/lactis BB-02, and Bifidobacterium longum BL-05. It will be appreciated, however, that certain embodiments may include one or two of the foregoing Bifidobacterium species and/or strains and/or in an amount of up to, at least, between, and/or about 10 billion CFU (per daily dose), 20 billion CFU (per daily dose), 30 billion CFU (per daily dose), 40 billion CFU (per daily dose), and/or 50 billion CFU (per daily dose). In at least one embodiment, the Probiotic ingredient comprises the following probiotic (bacterial) species or strains: 20 billion CFU/day each of the Lactobacillus species and/or strains Lactobacillus acidophilus LA-14, Lactobacillus rhamnosus LR-32, and Lactobacillus paracasei LPC-37. It will be appreciated, however, that certain embodiments may include one or two of the foregoing Lactobacillus species and/or strains and/or in an amount of up to, at least, between, and/or about 5 billion CFU (per daily dose), 10 billion CFU (per daily dose), 20 billion CFU (per daily dose), 30 billion CFU (per daily dose), and/or 40 billion CFU (per daily dose).

[0376] In at least one embodiment, vitamin C can be included in a daily dose and/or concentration of about 500 mg, or between about 100-2000 mg, preferably about 200-1500 mg, more preferably about 250-1200 mg, still more preferably about 400-1000 mg, still more preferably about 500-1000 mg, still more preferably about 500-750 mg (per day or per dosage). In at least one embodiment, vitamin C can be included in a daily dose and/or concentration of at least about 100 mg, 200 mg, 250 mg, 300 mg, 400 mg, 500 mg, 750 mg, or 1000 mg (per day or per dosage). In at least one embodiment, vitamin C can be included in a daily dose and/or concentration of less than or equal to about 2500 mg, 2000 mg, 1500 mg, 1000 mg, or 750 mg (per day or per dosage).

[0377] In at least one embodiment, vitamin D3 can be included in a daily dose and/or concentration of about 1000 mg, or between about 100-2500 mg, preferably about 200-2000 mg, more preferably about 250-1800 mg, still more preferably about 400-1500 mg, still more preferably about 500-1500 mg, still more preferably about 750-1250 mg (per day or per dosage). In at least one embodiment, vitamin D3 can be included in a daily dose and/or concentration of at least about 100 mg, 200 mg, 250 mg, 300 mg, 400 mg, 500 mg, 750 mg, 1000 mg, 1250 mg, 1500 mg, or 2000 mg (per day or per dosage). In at least one embodiment, vitamin D3 can be included in a daily dose and/or concentration of less than or equal to about 3000 mg, 2500 mg, 2000 mg, or 1500 mg (per day or per dosage).

[0378] In at least one embodiment, vitamin E can be included in a daily dose and/or concentration of about 400 mg, or between about 100-2000 mg, preferably about 150-1500 mg, more preferably about 200-1200 mg, still more preferably about 250-1000 mg, still more preferably about 250-750 mg, still more preferably about 250-500 mg, still more preferably about 300-750 mg, still more preferably about 300-500 mg (per day or per dosage). In at least one embodiment, vitamin E can be included in a daily dose and/or concentration of at least about 100 mg, 200 mg, 250 mg, 300 mg, 400 mg, 500 mg, 750 mg, or 1000 mg (per day or per dosage). In at least one embodiment, vitamin E can be included in a daily dose and/or concentration of less than or equal to about 2000 mg, 1500 mg, 1000 mg, 750 mg, or 500 mg (per day or per dosage).

[0379] In at least one embodiment, N-acetylcysteine (NAC) can be included in a daily dose and/or concentration of about 600 mg, or between about 100-2000 mg, preferably about 150-1500 mg, more preferably about 200-1200 mg, still more preferably about 250-1000 mg, still more preferably about 250-750 mg, still more preferably about 500-750 mg. In at least one embodiment, N-acetylcysteine (NAC) can be included in a daily dose and/or concentration of at least about 100 mg, 200 mg, 250 mg, 300 mg, 400 mg, 500 mg, 750 mg, or 1000 mg (per day or per dosage). In at least one embodiment, N-acetylcysteine (NAC) can be included in a daily dose and/or concentration of less than or equal to about 2000 mg, 1500 mg, 1000 mg, or 750 mg (per day or per dosage).

[0380] In at least one embodiment, quercetin (dihydrate) can be included in a daily dose and/or concentration of about 150 mg, or between about 10-1000 mg, preferably about 25-750 mg, more preferably about 50-500 mg, still more preferably about 100-250 mg, still more preferably about 100-200 mg (per day or per dosage). In at least one embodiment, quercetin (dihydrate) can be included in a daily dose and/or concentration of at least about 10 mg, 20 mg, 25 mg, 30 mg, 40 mg, 50 mg, 75 mg, 100 mg, 150 mg, 200 mg, or 250 mg (per day or per dosage). In at least one embodiment, quercetin (dihydrate) can be included in a daily dose and/or concentration of less than or equal to about 1000 mg, 750 mg, 500 mg, 400 mg, 300 mg, 250 mg, or 200 mg (per day or per dosage).

[0381] In at least one embodiment, rosmarinic acid (RA) can be included in a daily dose and/or concentration of about 500 mg, or between about 100-2000 mg, preferably about 200-1500 mg, more preferably about 250-1200 mg, still more preferably about 400-1000 mg, still more preferably about 500-1000 mg, still more preferably about 500-750 mg (per day or per dosage). In at least one embodiment, rosmarinic acid (RA) can be included in a daily dose and/or concentration of at least about 100 mg, 200 mg, 250 mg, 300 mg, 400 mg, 500 mg, 750 mg, or 1000 mg (per day or per dosage). In at least one embodiment, rosmarinic acid (RA) can be included in a daily dose and/or concentration of less than or equal to about 2500 mg, 2000 mg, 1500 mg, 1000 mg, or 750 mg (per day or per dosage).

[0382] In at least one embodiment, pterostilbene can be included in a daily dose and/or concentration of about 50 mg, or between about 10-200 mg, preferably about 20-150 mg, more preferably about 25-120 mg, still more preferably about 25-120 mg, still more preferably about 40-100 mg, still more preferably about 50-100 mg, still more preferably about 50-75 mg (per day or per dosage). In at least one embodiment, pterostilbene can be included in a daily dose and/or concentration of at least about 10 mg, 20 mg, 25 mg, 30 mg, 40 mg, 50 mg, 75 mg, or 100 mg (per day or per dosage). In at least one embodiment, pterostilbene can be included in a daily dose and/or concentration of less than or equal to about 250 mg, 200 mg, 150 mg, 100 mg, or 75 mg (per day or per dosage).

[0383] In at least one embodiment, DHA (preferably vegetarian DHA) can be included in a daily dose and/or concentration of about 200 mg, or between about 10-1000 mg, preferably about 25-750 mg, more preferably about 50-500 mg, still more preferably about 100-250 mg, still more preferably about 150-250 mg, still more preferably about 100-200 mg (per day or per dosage). In at least one embodiment, quercetin (dihydrate) can be included in a daily dose and/or concentration of at least about 10 mg, 20 mg, 25 mg, 30 mg, 40 mg, 50 mg, 75 mg, 100 mg, 150 mg, 200 mg, 250 mg, 300 mg, 400 mg, or 500 mg (per day or per dosage). In at least one embodiment, quercetin (dihydrate) can be included in a daily dose and/or concentration of less than or equal to about 2000 mg, 1500 mg, 1000 mg, 750 mg, 500 mg, 400 mg, 300 mg, or 250 mg (per day or per dosage).

[0384] In at least one embodiment, Nicotinamide Riboside (NR) can be included in a daily dose and/or concentration of about 500 mg, or between about 100-2000 mg, preferably about 200-1500 mg, more preferably about 250-1200 mg, still more preferably about 400-1000 mg, still more preferably about 500-1000 mg, still more preferably about 500-750 mg (per day or per dosage). In at least one embodiment, Nicotinamide Riboside (NR) can be included in a daily dose and/or concentration of at least about 100 mg, 200 mg, 250 mg, 300 mg, 400 mg, 500 mg, 750 mg, or 1000 mg (per day or per dosage). In at least one embodiment, Nicotinamide Riboside (NR) can be included in a daily dose and/or concentration of less than or equal to about 2500 mg, 2000 mg, 1500 mg, 1000 mg, or 750 mg (per day or per dosage).

[0385] In at least one embodiment, Nicotinamide adenine dinucleotide (NAD+) can be included in a daily dose and/or concentration of about 300 mg, or between about 50-2000 mg, preferably about 100-1000 mg, more preferably about 150-750 mg, more preferably about 200-600 mg, still more preferably about 200-500 mg, still more preferably about 200-400 mg, still more preferably about 250-500 mg, still more preferably about 250-400 mg, still more preferably about 300-500 mg, still more preferably about 300-400 mg (per day or per dosage). In at least one embodiment, Nicotinamide adenine dinucleotide (NAD+) can be included in a daily dose and/or concentration of at least about 50 mg, 100 mg, 200 mg, 250 mg, 300 mg, 400 mg, 500 mg, 750 mg, or 1000 mg (per day or per dosage). In at least one embodiment, Nicotinamide adenine dinucleotide (NAD+) can be included in a daily dose and/or concentration of less than or equal to about 2000 mg, 1500 mg, 1000 mg, 750 mg, 500 mg, 400 mg, or 350 mg (per day or per dosage).

[0386] In at least one embodiment, Nicotinamide Mononucleotide (NMN) can be included in a daily dose and/or concentration of about 200 mg, or between about 10-1000 mg, preferably about 25-750 mg, more preferably about 50-500 mg, still more preferably about 100-250 mg, still more preferably about 150-250 mg, still more preferably about 100-200 mg (per day or per dosage). In at least one embodiment, Nicotinamide Mononucleotide (NMN) can be included in a daily dose and/or concentration of at least about 10 mg, 20 mg, 25 mg, 30 mg, 40 mg, 50 mg, 75 mg, 100 mg, 150 mg, 200 mg, 250 mg, 300 mg, 400 mg, or 500 mg (per day or per dosage). In at least one embodiment, Nicotinamide Mononucleotide (NMN) can be included in a daily dose and/or concentration of less than or equal to about 2000 mg, 1500 mg, 1000 mg, 750 mg, 500 mg, 400 mg, 300 mg, or 250 mg (per day or per dosage).

[0387] Without being bound to any theory, in embodiments that include NAD+ and/or NAD+ precursor(s) (NR and/or NMN), the NAD+ and/or NAD+ precursor(s) may be in the form of a Lozenge for sublingual application (e.g., to get into the bloodstream, initially bypassing the liver and extending the time until the liver converts them into NAM). Other components may also be administered separately or co-administered. In some embodiments, ingredients can be co-administered, preferably via at least some co-formulation, or formulated as a multi-dosage composition. For example, some embodiments can be, comprise, or be provided as a multi-pill, -capsule, or other dosage kit or pack. Embodiments can include one, two, three, four, five, six, seven, eight, nine, ten, or more dosed components, such as pills, capsule, etc. Some ingredients can be provided in solid, granular, powdered, liquid, or other form.

[0388] Table 45 presents an illustrative formulation according to an embodiment of the present disclosure.

TABLE 45

| Ingredient for Capsules | Amount/Dose | Unit |
|---|---|---|
| vitamin C | 500 | mg |
| vitamin D3 | 1000 | IU |
| Vitamin E | 400 | IU |
| N-acetylcysteine (NAC) | 600 | mg |
| quercetin dihydrate | 150 | mg |
| rosmarinic acid (RA) | 500 | mg |
| pterostilbene | 50 | mg |
| DHA (Vegetarian) | 200 | mg |
| Nicotinamide Riboside (NR) | 500 | mg |
| Nicotinamide adenine dinucleotide (NAD+) | 300 | mg |
| Nicotinamide Mononucleotide (NMN) | 200 | mg |
| Probiotics (50B CFU - 6 Strains, below) | 50 Billion | CFU |

[0389] The ingredients of Table 45 can be optionally combined in any suitable combination. By way of non-limiting example, the alternative formulation(s) can be or comprise an orally administered, DSHEA-compliant formulation or composition. It will be appreciated, however, that alternative formulation(s) can be formulated in other dosage forms and/or as an FDA-approved drug without departing from the scope of this disclosure. The respective concentrations of ingredients in the alternative formulation(s) are based on a standard adult reference of a 150-pound person (68 kilograms). Alternative dosage(s), as understood by those skilled in the art, are also contemplated herein.

[0390] Some embodiments can include a composition, comprising an effective amount of a composition (e.g., health supplement), as described herein, formulated or co-formulated to increase endogenous Klotho protein levels or production (e.g., in mammalian subjects). The pharmaceutically effective amount of the composition can be sufficient to increase or raise the serum soluble Klotho protein concentration of the subject (e.g., to a predetermined level, such as greater than, equal to, or between about 50 to 3000 picograms of soluble Klotho protein per milliliter of serum). The pharmaceutically effective amount of the composition can also or alternatively be sufficient to maintain the serum soluble Klotho protein concentration of the subject at or above a predetermined threshold (e.g., for a predetermined period of time).

[0391] In certain embodiments, sufficient or suitable increase in Klotho protein levels can (be effective to) modulate the IGF-1 and/or Wnt signaling pathways, exhibit β-glucuronidase and/or sialidase activity, suppress the p53/p21 signaling pathway, and/or reduce H2O2-induced cell senescence and apoptosis, preferably through suppression of the p53/p21 signaling pathway. The (raised) protein can function or be functional as a humoral factor, preferably exhibiting pleiotropic activity and/or preferably in the regulation of oxidative stress, growth factor signaling, ion homeostasis, and/or regulation of activity of glycoproteins on the cell surface, such as one or more ion channel proteins and/or growth factor receptors, such as Insulin/Insulin-Like Growth Factor-1 receptor.

[0392] The formulated composition (e.g., health supplement) of the present disclosure can raise serum soluble Klotho protein levels by increasing or enhancing (natural) production of Klotho protein by the patient or subject or attenuating (e.g., decreasing, inhibiting, and/or preventing) oxidative or other damage or degradation to/of Klotho protein or the klotho gene.

[0393] Some embodiments of the present disclosure can include a pharmaceutical composition, such as a therapeutic composition or drug. For example, some embodiments can include one or more active ingredients, such as a pharmaceutical or prescription medications (e.g., ARBs (e.g., Losartan, Valsartan), testosterone, Vit. D receptor agonists (e.g., calcitriol, paricalcitol), PPAR (gamma) agonists (e.g., thiazolidinediones, troglitazone, rosiglitazone), or others. Some embodiments can include a formulation or co-formulation, in combination with prescribed medications such as angiotension receptor blockers (ARBs) (i.e., losartan, valsartan) or Vitamin D receptor agonists (VDRAs) (i.e., calcitriol or paricalcitol). Other prescription medications that may be administered with formulations include troglitazone (at 200 mg/kg/day) and rosiglitazone (at 20 mg/kg/day), both Peroxidase Proliferator-Activated Receptor (PPAR-γ) agonists. Without being bound to any theory, klotho is thought to be a target gene of PPAR-γ in the cultured human kidney cells, as well as in mouse kidneys in vivo. Moreover, Klotho protein expression may be enhanced (or upregulated) by treatment with PPAR-γ agonists (e.g., at the described oral dosages).

[0394] Without being bound to any theory, losartan may (significantly) increase circulating α-Klotho levels in human type 2 diabetics by an average of 23% (from 542 pg/ml to 668 pg/ml, p=0.001). Also, linear regression analysis suggests that the increment in plasma α-Klotho achieved enhanced healthy renal function as seen by an associated decrease in urine albumin/creatinine ratio (β=−0.263, p=0.029). Similarly, valsartan may significantly increase α-Klotho levels (from 432.7±179 to 506.4±226.8 pg/ml).

[0395] Also, in regard to the above, it is thought that treatment of mice with chronic kidney disease (CKD) with calcitriol or paricalcitrol (at VDRAs doses extrapolated from human subjects that are currently approved for the treatment of secondary hyperparathyroidism) result in half the amount of aortic calcification as compared to no VDRAs. In particular, mice given i.p. calcitriol or paricalcitol 3× per week for 3 weeks (dosing: calcitriol at 30 ng/kg (C30), or paricalcitol at 100 ng/kg (P100), or paricalcitol at 300 ng/kg (P300)) may exhibit increased serum and urine Klotho levels, increased phosphaturia, correction of hyperphosphatemia, and lowering of serum fibroblast growth factor-23. Klotho and osteopontin may also be upregulated by VDRA therapy independent of changes in serum parathyroid hormone and calcium.

[0396] Some embodiments, or pharmaceutical components thereof, can include one or more recombinant (e.g., human or mammalian) Klotho proteins, protein fragments, and/or protein variants. Such active ingredients or pharmaceutical components can contribute to increased levels of endogenous Klotho protein (production) in the patient or subject. Additional description of (various and/or additional) active ingredients, such as therapeutics, recombinant proteins, pharmaceutical, and/or prescription medications, are described in the patent references incorporated above (i.e., (i) PCT/US2017/035755 filed Jun. 2, 2017, (ii) PCT/US2017/063149 filed Nov. 22, 2017, and (iii) U.S. Provisional Application Ser. No. 62/595,567 filed Dec. 6, 2017). Such active ingredients can contribute to increased levels of endogenous Klotho protein (production) in the patient or subject.

[0397] Pharmaceutical compositions or components, regardless of type, can, generally, include a drug component, optionally admixed with a (pharmaceutically-acceptable) vehicle, carrier, or excipient comprised of one or more additional components. The components can include one or more aggregation inhibitors, buffers, tonicity modifiers, and additional excipients. The primary solvent in the carrier can be either aqueous or non-aqueous in nature.

[0398] Some embodiments can include a combination product, composition, or formulation comprising a recombinant Klotho protein and one or more additional active ingredients. The one or more additional active ingredients can be selected from among the components, drugs, substances, treatment compositions, etc. described herein or others known in the art. For instance, the Klotho protein and one or more additional active ingredients can be co-formulated into an injectable (e.g., intramuscular, intravenous, etc.), ingestible, transdermal, inhalable, topical, or other formulation. Alternatively, a combination treatment or co-administration can include treatment or administration of a Klotho protein and one or more additional active ingredients, but without the Klotho protein and one or more additional active ingredients being combined or formulated into a combination product, composition, or formulation. For instance, the Klotho protein and one or more additional active ingredients can each comprise or be in a separate injectable (e.g., intramuscular, intravenous, etc.), ingestible, transdermal, inhalable, topical, or other formulation.

[0399] Some embodiments can include a composition, comprising an effective amount of a composition (e.g., health supplement) and, optionally, an effective (e.g., a pharmaceutically effective) amount of the recombinant Klotho protein and/or pharmaceutical or prescription medications, as described herein, formulated or co-formulated to increase endogenous Klotho protein levels or production (e.g., in mammalian subjects). In some embodiments, the recombinant Klotho protein and/or pharmaceutical or prescription medications can be co-administered with the composition. In some embodiments, the recombinant Klotho protein and/or pharmaceutical or prescription medications can be combined with a pharmaceutically-acceptable carrier. In some embodiments, the optionally administered, optional recombinant Klotho protein can raise serum soluble Klotho protein levels by providing exogenous Klotho protein, while the optionally administered, optional pharmaceutical or prescription medications can raise serum soluble Klotho protein levels by increasing or enhancing (natural) production of Klotho protein by the patient or subject or attenuating (e.g., decreasing, inhibiting, and/or preventing) oxidative or other damage or degradation to/of Klotho protein or the klotho gene.

[0400] It will also be appreciated that co-administration can comprise simultaneous administration of two or more components or distinct administrations of two or more components, the distinct administrations preferably being separated by a period of time. The period of time can be very small, in some embodiments. For instance, a second component can be administered substantially, immediately following administration of a first component. Alternatively, the first and second administrations can be separated by a time period of 1-60 seconds, 1-60 minutes, 1-24 hours, 1-7 days, 1-4 weeks, 1-12 months, and so forth, or any value or range of values therebetween. Similarly, simultaneous administration can include overlapping administration timeframes for the two or more components.

[0401] Any of the foregoing or other compositions, formulations, and/or co-administrations can have additive or synergistic effects over those of any of the individual components, alone. For instance, co-administration of various health supplement ingredients or a health supplement composition with an active component (e.g., a recombinant Klotho protein, pharmaceutical drug, etc.) can result in treatment outcomes greater than the sum of the individual outcomes of administering the individual components alone at similar concentrations. In addition, synergistic effects can include treatment outcomes similar to those of the individual outcomes of administering the components alone, but at lower concentrations. Synergistic effects can also include increasing the maximum effective dose of one or more of the components, reducing toxicity of one or more of the components, or any other beneficial result that is more than a mere additive effect of the individual treatment outcomes. In addition, additive effects of the individual treatment outcomes can comprise one or more synergistic effects. Such additive/synergistic effects may not be predicted or expected given the nature and understanding of the individual components.

[0402] Certain embodiments can include expression nucleic acid constructs and/or vectors, cell lines and/or cell suspension cultures, and methods of manufacturing, purifying, and administering the one or more recombinant (e.g., human or mammalian) Klotho proteins, protein fragments, and/or protein variants to (human or non-human animal) subjects.

[0403] It will be appreciated that each of the forging, including but not limited to health supplements, formulations, co-formulations, co-administrations, combination products, and so forth, can be referred to as a “composition” or “composition of the present disclosure”.

### Administration of Exogenous S-Klotho

[0404] The present disclosure relates to S-Klotho formulations, clinical dosages, and administration (e.g., to increase and/or maintain serum concentrations of S-Klotho within the range of a normal and/or young (e.g., 18 - 30 years of age) person (e.g., without any chronic conditions).

[0405] Aspects or embodiments of the present disclosure include, for example, administering a (cGMP- and/or clinical grade) human recombinant alpha soluble Klotho protein or protein fragment (of isoform 1) to a (human) subject in need thereof. Embodiments can also include measuring (in the (human) subject) serum S-Klotho levels or concentration (e.g., by Mass Spectroscopy (MS) or ELISA). Such measuring can occur before, after, and/or during S-Klotho administration, and can be repeated, as necessary, to determine serum S-Klotho levels and/or a rate of metabolism, degradation, or reduction of serum S-Klotho levels. MS is a technique well known in the art. MS can be used to identify and even quantify the level of one or more (native and/or recombinant) Klotho proteins in the serum of a subject.

[0406] One or more additional proteins can also be measured in the subject's serum. For instance, one or more Klotho-related and/or aging-related proteins (e.g., FGF21, GDF-11, TIMP2, NAD+, CCL11, hormones testosterone, estrogen, etc.) and/or kidney function proteins (e.g., KIM-1, Cystatin-C, creatinine, BUN, creatinine, NGAL, etc.) can be measured separate from or in combination with measuring Klotho in the serum.

[0407] In at least one embodiment, a serum sample is obtained, such as a blood sample. The sample can be obtained by a blood draw, as known in the art. In a preferred embodiment, a finger prick or other less invasive means of obtaining a blood sample can be used. Accordingly, blood samples can be taken more frequently (e.g., throughout the day and/or every 0.5, 1, 2, 3, 4, 5, 6, 7, 8, 9, 10, 11, or 12 hours). MS can be used to measure the total Klotho protein serum concentration, as well as the serum concentration of various alpha Klotho protein species, such as native Klotho species (e.g., soluble Klotho, cleaved Klotho, secreted Klotho, etc.) and/or one or more Klotho proteins of the present disclosure. In some embodiments, Klotho levels can be measured before therapeutic recombinant Klotho protein administration and again throughout the day and/or every (or one or more of) 0.5, 1, 2, 3, 4, 5, 6, 7, 8, 9, 10, 11, or 12 hours post-administration. Alternatively, or in addition, Klotho levels can be measured every (or one or more of) 0.5, 1, 2, 3, 4, 5, 6, 7, 8, 9, 10, 11, 12, 13, 14, 16, 18, 20, 21, 25, 28, 30, 36, 40, 45, 50, 60, or 90 days (or weeks) post-administration.

[0408] Embodiments can also include determining such a rate and/or calculating a treatment protocol (e.g., including frequency, amount, and/or duration of (subsequent) administration(s) of S-Klotho) for maintaining within the serum of such subject a S-Klotho concentration within the range of a normal young person's serum concentration of S-Klotho. In at least one embodiment, the concentration of S-Klotho can be maintained at approximately 1000 picograms of (the S-Klotho) protein per milliliter of serum (pg/mL).

[0409] In at least one embodiment, a S-Klotho administration strategy (in humans) can include the measurement of one or more pharmacokinetic parameters of S-Klotho. For instance, measurements can be made of resultant changes in vivo of S-Klotho levels in the serum, urine and cerebrospinal fluid in response to S-Klotho administration. Some embodiments can include measuring the effectiveness of S-Klotho administration on one or more clinical indicators. Clinical indicators for various conditions, diseases, and disorders are known in the art and described further herein.

[0410] Embodiments can also include taking a (baseline) S-Klotho level measurement(s) (e.g., at zero time (before any administration of exogenous S-Klotho) and/or at different times of day before and/or throughout the treatment protocol (e.g., before and after administration of S-Klotho) in order to account for any circadian rhythm effects in the (human) subject(s)).

[0411] Embodiments can also include determining a suitable frequency, amount, and/or duration of S-Klotho administration. For instance, subjects with low S-Klotho serum levels (e.g., as determined by MS or ELISA immunoassay quantification), can be given (e.g., via any suitable route of administration) a first administration of klotho configured and/or adapted to bring the subjects serum S-Klotho levels to a first predetermined level (e.g., about 1000 pg/mL), measuring (the resultant change in) serum S-Klotho concentration in the subject (e.g., by MS or ELISA), measuring the levels and/or a rate of metabolism, degradation, or reduction of serum S-Klotho levels (following the first administration), calculating a half-life of the administered S-Klotho, and/or determining a frequency and/or timeframe in which a second, subsequent administration of S-Klotho should be given (e.g., in order to maintain serum S-Klotho levels above a second predetermined level). In at least one embodiment, the second predetermined level can be between and/or about 95%, 90%, 85%, 80%, 75%, 70%, 65%, 60%, 55%, 50%, 45%, 40%, 35%, 30%, 25%, 20%, 15%, 10%, and/or 5% of the first predetermined level.

[0412] Further administrations can be given over a timeframe suitable to produce in the subject (long-term) S-Klotho serum level equivalent to that of normal sex-matched young person's serum maintenance level (e.g., approximately 1000 pg/ml). The total timespan of the S-Klotho administration (to (human) subjects) can range from 1 day to 5 years, or more. Measurements and/or determinations of frailty in the subject based on the use of the clinical frailty score and other measurements can also be made over the timeframe.

[0413] Embodiments of the present disclosure further include increasing the S-Klotho dosage to maintain a 5%, 10%, 15%, 20%, 25%, 30%, 35%, 40%, 45%, 50%, 55%, 60%, 65%, 70%, 75%, 80%, 85%, 90%, 95%, 100% or more increase in S-Klotho levels above the normal range (e.g., at least about 500-1000 pg/ml serum, illustratively).

[0414] Certain embodiments include administering the S-Klotho protein. Non-limiting examples of suitable routes of administration include injection (e.g., bolus, gradual, intravenous, intradermal, intraperitoneal, intramuscular, intracutaneous, and/or subcutaneous injection), oral or oral-related administration (e.g., ingestion, buccal administration, and/or sublingual administration), topical administration, transdermal administration, rectal administration, vaginal administration, inhalation, and so forth.

[0415] An illustrative embodiment can include administering the S-Klotho protein or composition in a single bolus or extended (IV) injection (e.g., drip over an extended period of time). In at least one embodiment, 0.01, 0.05, 0.1, 0.5, 1, 1.5, 2, 2.5, 2.75, 3, 3.5, 4, 4.5, 5, 6, 7, 8, 9, 10, 12, 15, 18, 20, or more micrograms of S-Klotho per kilogram of subject body weight can be administered per treatment. A suitable administration amount can be calculated through one or more methods known in the art. One such method is the allometric scaling method. For example, in rat experiments, 0.01 mg of S-Klotho /kg body weight per administration was used, or 10 ug/kg. Using the human allometric scaled equivalent of 0.16, illustratively, the human equivalent dose (HED)=10 ug/kg×0.16=1.6 ug/kg. Hence a 70 kg human individual would require, 70 kg×1.6 ug/kg=112 ug and a 60 kg human would require, 60 kg×1.6=96 ug, illustratively. Table 46, below, demonstrates conversion of various animal doses to human equivalent doses (HED) based on body surface area. The conversions assume a 60kg human.

[0416] The HED was established using normalization to body surface area, a process described by Reagan-Shaw (2008), incorporated herein by reference. This process, termed allometric scaling, corrects for basal differences in metabolism rate between different species, and may be preferred over simple dose extrapolation. Illustratively, when the animal species dose is known, then the HED can be calculated as: HED=animal dose in mg/kg x allometric scaling factor for that appropriate animal species. The actual dose to be administered to a patient can then be calculated by multiplying the HED times the patient's weight.

TABLE 46

| | | To Convert Animal Dose in mg/kg | |
|---|---|---|---|
| | To Convert Animal | to HED^{a} in mg/kg, Either: | |
| | Dose in mg/kg to | Divide | Multiply |
| | Dose in mg/m², | Animal | Animal |
| Species | Multiply by kₘ | Dose By | Dose By |
| Human | 37 | — | — |
| Child (20 kg)^{b} | 25 | — | — |
| Mouse | 3 | 12.3 | 0.08 |
| Hamster | 5 | 7.4 | 0.13 |
| Rat | 6 | 6.2 | 0.16 |
| Ferret | 7 | 5.3 | 0.19 |
| Guinea pig | 8 | 4.6 | 0.22 |
| Rabbit | 12 | 3.1 | 0.32 |
| Dog | 20 | 1.8 | 0.54 |
| Primates: | | | |
| Monkeys^{c} | 12 | 3.1 | 0.32 |
| Marmoset | 6 | 6.2 | 0.16 |
| Squirrel | 7 | 5.3 | 0.19 |
| monkey | | | |
| Baboon | 20 | 1.8 | 0.54 |
| Micro-pig | 27 | 1.4 | 0.73 |
| Mini-pig | 35 | 1.1 | 0.95 |

[0417] Multiple factors can be considered or taking in account in determining, measuring, and/or estimating the amount and/or bioavailability of S-Klotho in humans (before and/or after recombinant protein administration), the total amount and/or concentration of S-Klotho to be administered, and/or the serum level response (over time) after recombinant protein administration. Such factors can include, for example, composition of the diluent, route of administration, site of administration, distribution into the tissues and organs of the subject, metabolic or other rate of the subject, pharmacokinetics (PK), pharmacodynamics (PD), toxicology (Tox), and so forth.

[0418] In at least one embodiment, a (normal) concentration of S-Klotho (e.g., in a healthy, young (18-30 years old) human adult) can be approximately 1000 pg/ml in serum. A typical adult can have a blood volume of approximately 5 liters, with females generally having less blood volume than males. Approximately 55% of human blood can be comprised of serum. Thus, (5 liters of blood/adult)×(0.55 serum/liter blood)=2.75 liters (2750 ml) of serum/adult. Assuming no endogenous serum S-klotho, to achieve a final concentration of 1000 pg/ml in the total blood serum; 2750 ml×1000 pg/ml=2,750,000 pg (or 2750 ng, or 2.75 pg) exogenous S-Klotho can be administered per adult subject.

[0419] To increase soluble Klotho to 50% greater than typical healthy levels (e.g., to 1500 pg/ml serum), a dose of 4.125 micrograms/subject can be administered. To increase soluble Klotho to 100% greater than typical healthy levels (e.g., to 2000 pg/ml serum) a dose of 5.5 micrograms/subject can be administered, and so forth.

[0420] A pharmaceutically effective and/or sufficient amount of purified recombinant S-klotho protein can be administered so as to raise the serum soluble Klotho protein concentration of the subject to any suitable level, such as greater than, equal to, or between about 50, 100, 250, 500, 750, 1000, 1250, 1500, 1750, 2000, 2250, 2500, 2750, 3000, 3500, 4000, 4500, 5000, 5500, 6000, 6500, 7000, 7500, 8000, 8500, 9000, 9500, 10,000, 11,000, 12,000, 13,000, 14,000, 15,000 20,000, 25,000, 30,000 40,000, 50,000, 75,000, 100,000 or more picograms of soluble Klotho protein per milliliter of serum, or greater than, equal to, or between about 5%, 10%, 15%, 20%, 25%, 30%, 40%, 50%, 60%, 70%, 80%, 90%, 100%, 150%, 200%, 250%, 300%, 400%, 500%, 600%, 700%, 800%, 900%, 1000%, 1200%, 1500%, 2000%, 2500%, 3000%, 4000%, 5000%, or more greater than typical healthy levels of soluble Klotho protein in serum.

[0421] In some embodiments, subjects can be administered one or more (bolus) intravenous, intradermal, intraperitoneal, intramuscular, intracutaneous, subcutaneous, and/or other injection of recombinant human S-Klotho protein at a dosage of greater than, equal to, or between about 0.01 mg/kg body weight in a suitable volume of Klotho buffer (e.g., 150 mM NaCl and 10 mM HEPES pH 7.4) or other pharmaceutically acceptable carrier. Thus, a 160 pound subject (i.e., body weight of 72.57 kg) can be administered a (bolus) injection of about 0.73 mg of S-Klotho per administration (based on the calculation of 0.01 mg of S-Klotho/kg×72.57 kg body weight). Likewise, a 170 pound person can receive a 0.77 mg of S-Klotho per administration. The total number and frequency of administrations can be determined based on achieving and maintaining in serum, a concentration of, for example, 1000 pg/ml of S-Klotho (equivalent to 0.000001 mg/ml serum). The latter can be ascertained as measured by MS or by a human S-Klotho ELISA assay.

[0422] In other embodiments, the dosage can be greater than, equal to, or between about 0.0001-10 mg/kg body weight, 0.0001-10 pg/kg body weight, 0.0001-10 ng/kg body weight, 0.0001-10 pg/kg body weight, or any value or range of values therebetween. Urine and/or blood can be collected at one or more time points, such as greater than, less than, equal to, between, and/or about 5 minutes, 10 minutes, 15 minutes, 20 minutes, 25 minutes, 30 minutes, 40 minutes, 45 minutes, 60 minutes, 90 minutes, 2 hours, 3 hours, 4 hours, 5 hours, 6 hours, 9 hours, 12 hours, 18 hours, 24 hours, 36 hours, 48 hours, 2.5 days, 3 days, 5 days, 7 days, 10 days, 14 days, 21 days, 4 weeks, 1 month, 2 months, 3 months, or more after a medical procedure or a first administration (dose) of recombinant Klotho protein (e.g., to measure, test, and/or determine serum S-Klotho levels and changes in response to administration and/or over time).

[0423] One or more embodiments include production and/or (subsequent) administration of a unique formulation of the S-Klotho active drug product and/or in combination with a pharmaceutically-acceptable carrier. The carrier can be suitable for IV and/or bolus injection. Embodiments can also include production and/or (subsequent) administration of a unique inactive prodrug formulation of the S-Klotho and/or in combination with a pharmaceutically-acceptable carrier (so that an inactive S-Klotho can be activated in vivo to release biologically effective S-Klotho in animals or in human subjects. Such prodrug formulation can include a coating or time-release formulation.

### Treatment Methods, Uses, Etc.

[0424] Some embodiments include a method or treatment method (e.g., comprising one or more method steps). Some embodiments can include administering one or more compositions, as described herein, to a subject (e.g., a subject in need thereof). Administration of the inventive composition(s) can be sufficient to raise the serum soluble Klotho protein concentration of the subject to or above a predetermined threshold, or to maintain the serum soluble Klotho protein concentration of the subject at or above a predetermined threshold, for a period of time.

[0425] The composition can comprise, for example, (i) a therapeutic recombinant Klotho protein or fragment or fusion protein thereof, as described in the present disclosure, and/or (ii) a product that increases, enhances, augments, and/or supports endogenous Klotho protein production and/or level(s) in a patient to which the product is administered, optionally with (iii) one or more additional (active or inactive) ingredients or compositions. Those skilled in the art will appreciate that each of the therapeutic effects, indications, and/or treatments outlined herein in relation to recombinant, therapeutic Klotho proteins and products, compositions, and methods related thereto can be achieved by (naturally) increasing, enhancing, augmenting, and/or supporting endogenous Klotho protein production and/or level(s). Those skilled in the art will also appreciate that each of the therapeutic effects, indications, and/or treatments outlined herein in relation to (naturally) increasing, enhancing, augmenting, and/or supporting endogenous Klotho protein production and/or level(s) can be achieved by administering recombinant, therapeutic Klotho proteins and products, compositions, and through methods related thereto. Accordingly, and for the sake of brevity, the present disclosure need not rehearse each of the disclosed therapeutic effects, indications, and/or treatments with reference to both (i) the administration of recombinant, therapeutic

[0426] Klotho proteins, and (ii) the administration of the health supplement or nutraceutical compositions of the present disclosure, as such are clearly contemplated herein.

[0427] Certain embodiments can include a composition, as described herein, for use in treating one or more diseases, disorders, injuries, and/or (medical) conditions. Similarly, embodiments can include a method of treating (or alleviating, addressing, preventing, inhibiting, etc.) one or more diseases, disorders, injuries, and/or (medical) conditions. An exemplary treatment method comprises administering to a subject in need thereof an effective amount of a composition of the present disclosure. Without being bound to any theory, administering an effective amount of the composition to a subject in need thereof can cause or result in elevated (or raised) serum soluble Klotho protein concentration in the subject. Accordingly, the “effective amount” of a composition of the present disclosure can be an amount effective to raise or elevate the serum soluble Klotho protein concentration of the subject to or above a predetermined threshold, or to maintain the serum soluble Klotho protein concentration of the subject at or above a predetermined threshold, for a predetermined period of time. Alternatively, or in addition, the “effective amount” of a composition of the present disclosure can be an amount effective to achieve a beneficial therapeutic effect in a patient to which the composition is administered.

[0428] The method, composition or (raised) protein can also be effective to treat one or more diseases, disorders, injuries, and/or (medical) conditions. Illustratively, the condition can be or comprise an age-related or aging-related condition (or condition associated with (human) aging), such as frailty, bone density loss or bone mineral density loss, weight loss, muscular atrophy or degeneration, decline in muscle mass, decline in muscle strength, hand strength, leg strength, or physical fitness, decline in movement, freedom of movement, quality of life assessment, ejection fraction, or exercise capacity, decline in learning, learning capacity, memory, or intellectual quotient, cognitive deterioration or forgetfulness, decline in cognitive capacity or function, decline in synaptic plasticity or synaptic function, and cellular senescence. It will be appreciated, however, that the condition can also, or alternatively, be or comprise any physical, mental, emotional, or other deficiency, need, or desire that increased serum Klotho levels can provide a beneficial therapeutic effect, including those described in the present disclosure and those known to those skilled in the art.

[0429] The method, composition or (raised) protein can also be effective to treat one or more aging-related condition (or condition associated with (human) aging), such as Alzheimer's disease, Parkinson's disease, dementia or vascular dementia, amyotrophic lateral sclerosis (ALS) or motor neuron disease (MND), atrial fibrillation, chronic obstructive pulmonary disease (COPD), fibromyalgia, adult onset diabetes, arthritis or rheumatoid arthritis, osteoarthritis, osteoporosis, glaucoma, cataracts, macular degeneration and other eye diseases/disorders, multiple sclerosis (MS), lupus, and/or ulcerative colitis.

[0430] Some embodiments of the present disclosure can be useful in one or more of treating cancer, lowering serum phosphate levels in a patient, treating diabetes or a diabetes- related condition (e.g., Type 1 diabetes mellitus, etc.) in a subject in need of such treatment, treating a heart condition (e.g., cardiovascular disease, left ventricular hypertrophy (LVH), pathological LVH and/or congestive heart failure, etc.) in a subject, treating acute lung injury in a subject (e.g., using nanoparticles), protecting the lung of a patient against oxidant injury, detecting early acute kidney injury in critically ill patients, attenuating vascular calcification in a subject, improving cognition, treating renal and/or liver ischemia, modulating stress response in (human) senescent endothelial cells, prophylactically and/or therapeutically treating, preventing, attenuating, arresting, and/or reversing acute and/or chronic kidney injury, disease, or disease progression and/or uremic cardiomyopathy, reversing or attenuating age-related therapy resistance in melanoma and other cancers, as well as muscular dystrophy, including DMD, targeting apoptosis of senescent cells, preferably restoring tissue homeostasis thereby, and a variety of other indications.

[0431] Some embodiments of the present disclosure can be useful for treating one or more other conditions. Such conditions may be described or disclosed herein. Such conditions may be known by those skilled in the art to be related to Klotho serum levels.

[0432] As described briefly, above, the present disclosure includes and contemplates various dosage forms and/or methods of administration of compositions of the present disclosure. Some embodiments can be dosed in an oral dosage form and/or administrated orally (e.g., in one or more convenient forms including tinctures, tablets, capsules, powders, teas, etc.). For instance, a tincture, comprised of an alcohol- or glycerin-based extract of a herb or natural ingredient can be packaged in a glass dropper bottle. Glycerin-based tinctures can provide a sweet taste, making the formulation more easily to swallow. Tinctures may also be administered in a dropper. Tinctures may include a dosage range on the label (e.g., 20 to 40 drops per adult dose).

[0433] Capsules and tablets are also popular form for the oral administration of supplements. For example, a dried herb can be powdered and pressed into gelatin capsules. The supplement may be supplied as a capsule and/or tablet. The supplement may be supplied as a powder within a bottle or envelope with dosage amounts to be used listed on the container. An appropriate amount of powder per dose may also be obtained by opening up a dosage capsule and sprinkling the content into a drink or on food.

[0434] Teas (e.g., herbal infusions) are common forms of herbal remedy and a soothing way to take herbs. An herbal infusion can be made by placing a small amount of the herb in a cup, filling the cup with boiling water and letting it steep. In a tea form, herbal ingredients of the supplements may increase in potency with extended steeping time and the tea is best left to steep for at least 10 minutes. Covering the cup (a small saucer works well) keeps the steam in and keeps the tea hot longer.

[0435] Some embodiments can include a method of treating an aging-related or other condition, disease, or disorder, the method comprising administering to a subject in need thereof an effective amount of a composition of the present disclosure. Some embodiments can include a method of treating and/or preventing a condition, disease, or disorder, preferably a condition, disease, or disorder associated with aging, in a mammalian subject, the method comprising administering to a subject in need thereof an effective amount of a composition of the present disclosure. Some embodiments can include a method of treating or preventing acute kidney injury (AM), chronic kidney disease (CKD), or other condition, the method comprising administering to a subject in need thereof an effective amount of a composition of the present disclosure. Some embodiments can include a method of treating and/or preventing kidney injury in a mammalian subject, the method comprising administering to the subject, optionally prophylactically, prior to a medical procedure or administration of a nephrotoxin and/or following a medical procedure or administration of a nephrotoxin, an effective amount of a composition of the present disclosure. Some embodiments can include a method of administering a composition of the present disclosure to a human or non-human animal (e.g., mammalian) subject in need thereof. The subject to whom the composition is administered can be suffering from or at risk for a variety of conditions (e.g., disorders, diseases, injuries, illnesses, etc.). For example, some embodiments include a method of treating one or more chronic diseases and/or aging-related condition, such as a physical, mental, neurological, or other condition associated with (human) aging. Some embodiments can promote healing, recovery, longevity, and/or other beneficial outcome through one or more mechanisms or action.

[0436] The pharmaceutically effective amount of the composition can be sufficient to increase or raise the serum soluble Klotho protein concentration of the subject (e.g., to a predetermined level, such as greater than, equal to, or between about 50 to 3000 picograms of soluble Klotho protein per milliliter of serum). The pharmaceutically effective amount of the composition can also or alternatively be sufficient to maintain the serum soluble Klotho protein concentration of the subject at or above a predetermined threshold (e.g., for a predetermined period of time).

[0437] In certain embodiments, suitable increase in protein levels can (be effective to) modulate the IGF-1 and/or Wnt signaling pathways, exhibit δ-glucuronidase and/or sialidase activity, suppress the p53/p21 signaling pathway, and/or reduce H₂O₂-induced cell senescence and apoptosis, preferably through suppression of the p53/p21 signaling pathway. The (raised) protein can function or be functional as a humoral factor, preferably exhibiting pleiotropic activity and/or preferably in the regulation of oxidative stress, growth factor signaling, ion homeostasis, and/or regulation of activity of glycoproteins on the cell surface, such as one or more ion channel proteins and/or growth factor receptors, such as Insulin/Insulin-Like Growth Factor-1 receptor.

[0438] Certain embodiments can include determining a serum soluble Klotho protein concentration of the subject, calculating the effective amount, determining a rate of soluble Klotho protein decline in the serum of the subject, calculating a subsequent dosage time at which the serum soluble Klotho protein concentration of the subject will be at or below a second predetermined level based on the determined rate, calculating a subsequent dosage amount of the composition sufficient to raise the serum soluble Klotho protein concentration of the subject from the second predetermined level to the first predetermined level, and/or administering the subsequent dosage amount of the composition to the subject. Certain embodiments can include prescribing a regular (e.g., daily) dose or dosage form of the composition to the subject (e.g., based on determined levels of serum soluble Klotho protein concentration of the subject).

[0439] An illustrative embodiment comprises a (treatment) method. The treatment method can be similar to and/or modeled after a study of the therapeutic effect or health benefits of various compositions of the present disclosure. The results of administration of various compositions are monitored in human subjects. Once a subject has voluntarily agreed to be in the study, and signed the Patient Consent Form, they are given a physical examination and blood and saliva tests. Upon meeting the Inclusion Criteria in the Study Protocol, the subject is then enrolled in the study. Illustratively, the study may include 100 healthy individuals that are not currently on vitamin D supplementation and that do not live in a sunny environment. Subjects with a KLVS variant (Klotho over-expressor) and/or other genetic variant of klotho gene(s) may be excluded from the study. Following enrollment, the subjects receive a 3-month supply of a Klotho supplement formulation of the present disclosure or a placebo in a double-blind study. Subjects receive unmarked bottles of supplement formulation or placebo at no cost. Subjects take this supplement daily for 3 months.

[0440] At the end of this 3-month period, blood is drawn for a fasting blood test, and the subject's weight, blood pressure is measured and recorded along with the concentration of plasma alpha soluble Klotho determined by an Alpha Klotho (α-Klotho) Human Soluble ELISA Assay Kit (from for example, Catalog No. 27998, from IBL America, Minneapolis, Minn., USA).

[0441] The Study/Design Procedures regarding the human subjects in this study is given below.

### Study Design/Procedures:

[0442] Up to 100 patients

[0443] Duration: 3 months to first endpoint, crossover, second endpoint at 6 months including placebo patients that elected to take the supplement.

[0444] Baseline Questionnaire to include: Current medications (statins, ARBs), nutritional supplements, blood pressure, exercise frequency, alcohol consumption.

[0445] Prior to enrolling:

[0446] Collect blood sample and cheek swab (PI office or mobile phlebotomist)

[0447] Determine KLVS variant (KLOTHO overexpressor)—send cheek swab to lab to determine KLVS variant (Klotho over-expressor) status

[0448] Lab analysis of Klotho level, Vitamins D & E, and other analyses for pre-treatment baseline

[0449] Supplementation: (3-month supply) shipped to participant. (Active supplement and placebo controls, equal # of active and placebo controls)

[0450] Outcomes measure: Participant downloads mobile application to monitor compliance and questionnaires (exercise, blood pressure)

[0451] Follow up blood sample collection at 3 months and 6 months

[0452] The ingredients in the supplement are comprised of nutritional components that pose very low risk. If subject experiences any discomfort or adverse reaction to the formulation he or she will be instructed to stop taking the product and contact the study doctor.

[0453] Any significant adverse reactions will be reported to the study's IRCM Institutional review Board (IRB) within 48 hours.

### Example Conditions

[0454] In some embodiments, the condition, disease, or disorder treated with the composition(s) and/or method(s) of the present disclosure can, preferably, be selected from the group consisting of, for example: frailty; bone density loss; bone mineral density loss; weight loss; muscular atrophy; muscular degeneration; decline in muscle mass; decline in muscle strength; decline in hand strength; decline in leg strength; decline in physical fitness; decline in movement; decline in freedom of movement; decline in quality of life assessment; decline in ejection fraction; decline in exercise capacity; decline in learning; decline in learning capacity; decline in memory; decline in intellectual quotient; cognitive deterioration; forgetfulness; decline in cognitive capacity; decline in cognitive function; decline in synaptic plasticity; decline in synaptic function; cellular senescence; chronic kidney disease (CKD); chronic kidney disease—mineral and bone disorder (CKD-MBD); polycystic kidney disease (PKD); autosomal dominant polycystic kidney disease (ADPKD); acute kidney injury (AM); acute tubular necrosis (ATN); acute allergic interstitial nephritis (AAIN); glomerulonephritis; kidney disease; renal failure; Alport Syndrome; nonoliguric renal failure; alcoholism; hyperphosphatemia; muscular dystrophy (MS); type 1 diabetes; type 2 diabetes; cardiovascular disease (CVD); cardiovascular calcification; cerebrovascular insufficiency; vascular calcification; coronary artery disease; heart failure; left ventricular hypertrophy; uremic cardiomyopathy; abnormalities in blood pressure; salt-sensitive hypertension; tissue calcification; calcific atherosclerotic plaque burden; calcinosis; familial tumoral calcinosis; cancer; one or more tumors; myelin-related diseases; demyelinating diseases; neurodegenerative disease; neurovascular diseases; progressive supranuclear palsy (PSP); Pompe disease; Niemann-Pick disease; microgliosis; Farber disease (FD); bone mass diseases; osteoporosis; osteopenia; osteopenia (particularly loss of BMD of cortical bone); pulmonary emphysema; pulmonary fibrosis; cystic fibrosis, idiopathic (i.e., cause unknown) pulmonary fibrosis, radiation-induced lung injury, cirrhosis, biliary atresia, atrial fibrosis, endomyocardial fibrosis, (old) myocardial infarction, glial scar, arterial stiffness, arthrofibrosis, Crohn's disease, Dupuytren's contracture, keloid, mediastinal fibrosis, myelofibrosis, Peyronie's disease, nephrogenic systemic fibrosis, progressive massive fibrosis, retroperitoneal fibrosis, scleroderma/systemic sclerosis, adhesive capsulitis, skin atrophy; thymic atrophy; accumulation of renal interstitial matrix; glomerulosclerosis; anemia; albuminuria; proteinuria; infertility; Alzheimer's disease; Parkinson's Disease; dementia; vascular dementia; amyotrophic lateral sclerosis (ALS); motor neuron disease (MND); atrial fibrillation; chronic obstructive pulmonary disease (COPD); fibromyalgia; adult onset diabetes; arthritis; rheumatoid arthritis; osteoarthritis; glaucoma; cataracts; macular degeneration; multiple sclerosis (MS); lupus; ulcerative colitis; cachexia; obesity; vitamin D-related conditions; bone diseases; bone diseases through bone remodeling; gut diseases and related conditions; stem cell depletion; sea sickness; space adaptation syndrome (SAS); nausea; vertigo; non-alcoholic steatohepatitis (NASH), cirrhosis of the liver and alcoholic steatohepatitis.

[0455] Klotho serum levels have also been reported as being associated with muscle recovery, such as postinjury muscle healing. In particular, and without being bound to any theory, age-related declines in α-Klotho may drive progenitor cell mitochondrial dysfunction and impaired muscle regeneration. Clinically, this could translate to treatment of older adults who either sustained a muscle injury or underwent muscle-damaging surgery. Embodiments of the present disclosure can include administering a composition, as described herein, prophylactically and/or post-operatively. Administration at the appropriate timepoint(s) can enhance or support muscle regeneration and lead to a more complete recovery. Serum Klotho protein levels may also enhance or support muscle regeneration in athletes and other patients. Accordingly, embodiments of the present disclosure can include administering a composition, as described herein, prophylactically (pre-workout) and/or following exercise.

### Administration of Compositions to Treat Age-Related Frailty in Humans and Non-Human Mammals

[0456] An exemplary embodiment of the present disclosure relates to the administration of a composition to treat age-related frailty (e.g., in humans or non-human animals). s-Klotho may rescue myogenic stem cells, improve muscle repair, and/or suppress fibrosis in animal models of human disease. Compositions that increase s-Klotho levels may, therefore, be a promising approach to counter muscle degeneration in aging human subjects showing signs of frailty.

[0457] For instance, the present disclosure relates to s-Klotho level-increasing compositions, formulations, and dosages, and administration thereof to a fragile and/or elderly (e.g., 60-95 years of age) person in order to maintain in the subject a maintenance serum concentration of s-Klotho within the range of a normal and/or young (e.g., 18-30 years of age) person (e.g., without any chronic conditions).

[0458] Such Klotho treatment over an extended period of time can recover and/or improve one or more aging-related indicator or conditions in the elderly, frail, or otherwise physiologically aging.

### Administration of Compositions to Treat (Decrease) Muscle Atrophy in Humans and Non-Human Mammals

[0459] An exemplary embodiment of the present disclosure relates to the administration of compositions of the present disclosure to treat (e.g., decrease (the rate of)) muscle atrophy in human, as measured by skeletal muscle tissue mass and, preferably, the concurrent use of the above compositions and molecular indicators to provide guidance on the effects of administration in countering muscle atrophy.

[0460] Muscle atrophy can include numerous neuromuscular, metabolic, immunological and neurological disorders and diseases as well as starvation, nutritional deficiency, metabolic stress, diabetes, aging, muscular dystrophy, or myopathy. Muscle atrophy can occur during the aging process. Muscle atrophy can also result from reduced use or disuse of the muscle. Symptoms include a decline in skeletal muscle tissue mass. In human males, muscle mass declines by one-third between the ages of 50 and 80. Some molecular features of muscle atrophy can include the upregulation of ubiquitin ligases, and the loss of myofibrillar proteins. The breakdown of these proteins, which can be monitored (e.g., by measuring 3-methyl-histidine production, which is a specific constituent of actin), for example, in certain muscles of myosin. Release of creatine kinase (a cell damage marker) can also be indicative.

### Administration of Compositions to Treat (Improve) Muscle Repair or Recovery in Humans and Non-Human Mammals

[0461] Klotho serum levels have also been reported as being associated with muscle recovery, such as postinjury muscle healing. In particular, and without being bound to any theory, age-related declines in α-Klotho may drive progenitor cell mitochondrial dysfunction and impaired muscle regeneration. Clinically, this could translate to treatment of older adults who either sustained a muscle injury or underwent muscle-damaging surgery. Embodiments of the present disclosure can include administering a composition, as described herein, prophylactically and/or post-operatively. Administration at the appropriate timepoint(s) can enhance or support muscle regeneration and lead to a more complete recovery. Serum Klotho protein levels may also enhance or support muscle regeneration in athletes and other patients. Accordingly, embodiments of the present disclosure can include administering a composition, as described herein, prophylactically (pre-workout) and/or following exercise.

Administration of Compositions to Treat Mental and/or Cognitive Decline in Old Age and/or throughout the Human Lifespan

[0462] An exemplary embodiment of the present disclosure relates to the administration of compositions of the present disclosure to improve and/or counteract (aging-related) decline in cognitive function(s). At the time of the present disclosure, it was unknown whether administration of compositions of the present disclosure may counteract cognitive decline in humans. However, transgenic mice with systemic over-expression of klotho performed better than controls in multiple tests of learning and memory. Elevating klotho in mice also enhanced long-term potentiation, a form of synaptic plasticity, and enriched synaptic GluN2B, an N-methyl-D-aspartate receptor (NMDAR) subunit with key functions in learning and memory. Blockade of GluN2B abolished klotho-mediated effects.

[0463] Klotho-regulated pathways may be relevant to slowing the progression of Alzheimer's disease and other forms of dementia. Brain scans of more than 400 healthy men and women aged 53 and over found that those who carried a single copy of a particular Klotho gene variant had a larger brain region that deals with planning and decision making. Further tests on the group found that those with an enlarged right dorsolateral prefrontal cortex (rDLPFC) fared better on a series of mental tasks.

[0464] About one in five people inherits a single copy of the gene variant, or allele, known as KL-VS, which improves heart and kidney function, and on average adds about three years to human lifespan. However as to the brain function, having a larger rDLPFC accounted for only 12% of the improvement in people's mental test scores while, on the other hand, as the editorial points out, carrying one copy of the KL-VS allele appears to confer a decade of resilience against the expected decline in structure and function of the rDLPFC. Thus, KL-VS heterozygosity appears to be associated with greater volume in right dorsolateral prefrontal cortex (rDLPFC).

[0465] Because rDLPFC is important for executive function, the investigators also analyzed working memory and processing speed in individuals. KL-VS heterozygosity may be associated with enhanced executive function across the lifespan examined. In short, results may suggest that variation in the klotho gene may be associated with bigger brain volume and better function.

[0466] An exemplary embodiment of the present disclosure relates to the administration of compositions of the present disclosure to augment in vivo Klotho protein levels and/or (cellular, molecular, and/or downstream) effects (e.g., in order to enhance cognition and counteract cognitive deficits throughout the human lifespan). Administration of s-Klotho level-increasing compositions can preserve and/or improve cognitive function (e.g., in humans).

Administration of Compositions to Treat (Prolong) Human Longevity and/or Lifespan

[0467] An exemplary embodiment relates to the administration of compositions of the present disclosure to chronological (e.g., age-matched from birth) and sex-matched human subjects to improve average lifespan. The results on average lifespan obtained with composition administration (the experimental group of human subjects) can be compared reliably to those individuals not receiving a composition (the control group) and/or with statistical information (e.g., from actuarial tables) for a sufficiently large human population.

Administration of Compositions to Treat other Clinical Indications

[0468] An exemplary embodiment of the present disclosure relates to the administration of compositions of the present disclosure to treat any age-associated or otherwise non-age associated condition, including, but not limited to (increase in) human frailty, (decrease in) longevity, (decrease in) cellular senescence, (decline in) muscle strength, (decrease in) bone loss or density, (decrease in) cognition, (decline in) muscle mass, (decline in) physical fitness, (decline in) hand strength, (decline in) leg strength, and so forth. The present disclosure also relates to the administration of compositions of the present disclosure to increase bone mineral density (BMD) (e.g., in women but not in men), to increase BMD (e.g., in elderly women), which is reduced after menopause, to regenerate or reduce the degeneration of (degenerative) skeletal muscle, to improve walking gait, to improve (or reduce the decline in) spatial learning and memory, movement, freedom of movement, quality of life assessment, ejection fraction, exercise change, exercise improvement, and so forth. The present disclosure further relates to the administration of compositions of the present disclosure to decrease cognitive deterioration or forgetfulness, to increase cognitive capacity, to improve cognitive function and synaptic plasticity, to decrease a decline in learning, learning capacity or IQ, to improve learning, learning capacity or IQ, and so forth.

### Administration of Compositions to Treat Acute Kidney Injury (AKI)

[0469] Acute kidney injury (AKI), previously called acute renal failure (ARF), is often defined as an abrupt onset of renal dysfunction ranging from minor loss of function to failure. AM is a common clinical complication that develops in approximately 4%-7% of hospitalized patients each year and the prognosis can be poor. Mortality rates associated with AM range from 5%-35%. Renal Klotho expression has been shown to be suppressed following AM. Adenoviral gene transfer of Klotho can be cytoprotective in AKI.

[0470] Acute Kidney Injury (AKI) has been report in approximately 4.9%-7% of hospitalized patients each year. The rate of AM may be as high as 60% in (hospitalized) elderly persons and 20-30% in elderly or critically ill patients. AM is also associated with increased mortality, length of stay (LOS), 30 day re-administration rates and hospital cost.

[0471] AKI may result at least in part from kidney transplant or other surgery, acute tubular necrosis (ATN), acute allergic interstitial nephritis (AAIN), nephritis (e.g., glomerulonephritis), nephrotoxicity (e.g., drug-induced nephrotoxicity), low blood pressure, sepsis or septic condition, or other contributing factor(s). Kidney transplant and other surgeries can cause acute damage or injury to the kidneys, cause renal disease and/or failure. Nephrotoxicity can contribute to AKI, ATN, AAIN, nephritis, etc. It has been reported that drugs (e.g., clinically-administered, prescription, illegal, or other drugs) are associated with 15% to 25% of all cases of AKI. Contrast media alone accounts for 10% of all causes of hospital-acquired acute renal failure (e.g., via contrast-induced acute kidney injury CIAKI) and represents the third leading cause of in-hospital renal function deterioration after decreased renal perfusion and postoperative renal insufficiency.

[0472] In some cases, drug-induced AM can be or comprise anti-microbial-induced nephrotoxicity (resulting from anti-microbial treatment). For instance, certain (gram-negative) bacterial infections can be treated with one or more aminoglycosides, such as paromomycin, tobramycin, gentamicin, amikacin, kanamycin, neomycin, and so forth. Aminoglycosides have been shown to be nephrotoxic. Table 47 presents treatment data collected on the adult patients receiving the aminoglycosides. As illustrated in Table 47, nearly 23% of patients treated with amikacin, a common aminoglycoside, developed acute kidney disease and over 17% of patients treated with amikacin died prior to being discharged. Other aminoglycosides, including gentamicin, and tobramycin also induced (or were associated with or contributed to) kidney disease.

TABLE 47

| | Amikacin | Gentamicin | Tobramycin | Aminoglycosides |
|---|---|---|---|---|
| Length of Stay | 11.8% | 8.7 | 10.4 | 9.2 |
| Discharged Home | 55.1% | 72.0% | 62.6% | 68.9% |
| Died | 17.1% | 4.1% | 6.3% | 5.8% |
| ICU | 21.8% | 18.2% | 21.8% | 18.7% |
| Pediatric Patient (<18 yrs.) | 0.0% | 21.6% | 6.1% | 16.5% |
| Nursing Home Patient | 21.1% | 12.5% | 20.2% | 14.6% |
| Kidney Disease | 22.9% | 13.5% | 16.2% | 14.8% |
| Top 5 Dx | UTI/cystitis | UTI/cystitis | Pneumonia | UTI/cystitis |
| | Sepsis | Sepsis | UTI/cystitis | Sepsis |
| | Pneumonia | Skin Infection | Sepsis | Pneumonia |
| | Skin Infection | Pneumonia | Skin infection | Skin Infection |
| | Pelivc infection | FUO | Pelvic Infection | Pelvic Infection |

[0473] As illustrated in FIGS. 13A and 13B, over 1.2 million adult patients, in various age groups, were treated with aminoglycosides in the year 2010. Other anti-microbial agents include, for example, penicillins, ampicillin, cephalosporins, sulfonamides, ciprofloxacin, vancomycin, macrolides, tetracyclines, rifampin, and so forth.

[0474] Drug-induced nephrotoxicity can also result from treatment with one or more non-steroid anti-inflammatory drugs (NSAIDs), such as aspirin (acetylsalicylic acid), celecoxib, diclofenac, diflunisal, etodolac, ibuprofen, indomethacin, ketoprofen, ketorolac, nabumetone, naproxen, oxaprozin, piroxicam, salsalate, sulindac, tolmetin, and so forth.

[0475] Drug-induced nephrotoxicity can also result from treatment with one or more cyclooxygenase-2 (COX-2) inhibitors (e.g., valdecoxib, rofecoxib, celecoxib, etc.), proton pump inhibitors (e.g., omeprazole, lansoprazole, etc.), anticonvulsants (e.g., phenytoin, valproic acid, etc.), histamine H2 receptor antagonist (e.g., nizatidine, ranitidine, famotidine, cimetidine, etc.), diuretics (e.g., carbonic anhydrase inhibitors, loop diuretics (e.g., bumetanide, ethacrynic acid, torsemide, furosemide, etc.), potassium-sparing diuretics (e.g., triamterene, spironolactone, amiloride, etc.), thiazide diuretics (e.g., indapamide, chlorthalidone, metolazone, methyclothiazide, hydrochlorothiazide, chlorothiazide, bendroflumethiazide, polythiazide, hydroflumethiazide, etc.), or other diuretics, such as pamabrom, mannitol, and so forth.

[0476] Drug-induced nephrotoxicity can also result from treatment with lithium, which can affect the flow of sodium through nerve and muscle cells in the body and can be used to treat manic episodes of bipolar disorder, often characterized by hyperactivity, rushed speech, poor judgment, reduced need for sleep, aggression, and anger. Lithium can also help to prevent or lessen the intensity of manic episodes. Drug-induced nephrotoxicity can also result from treatment with or exposure to gold, mercury, copper, or other elemental matter.

[0477] Drug-induced nephrotoxicity can also result from treatment with (D-) penicillamine; a medication of the chelator class, which can be used to treat scleroderma, Wilson's disease (by binding to accumulated copper for elimination through urine), cystinuria (by binding with cysteine to yield a mixed disulfide which is more soluble than cysteine), direct-acting smooth muscle relaxant (e.g., hydralazine), spasmolytics (e.g., carisoprodol, cyclobenzaprine, metaxalone, methocarbamol, benzodiazepines, such as diazepam, clonidine and other imidazoline compounds, tizanidine, baclofen, hydantoin derivatives, dantrolene, and so forth.

[0478] Other forms of drug-induced nephrotoxicity can include, for example: contrast-induced nephrotoxicity (e.g., following exposure to (iodinated) contrast media, also known as radiocontrast-induced nephropathy (CIN)); narcotic- (opioid-) induced nephrotoxicity (e.g., following use or abuse of certain narcotics (e.g., opioids), such as cocaine, heroin, etc.); chemotherapy-induced nephrotoxicity (e.g., following treatment with a cancer therapeutic, such as: cisplatin; carboplatin; oxaliplatin; alkylating agents, such as bendamustine, cyclophosphamide, ifosfamide, nitrosoureas, temozolomide, melphalan, etc.; antitumor antibiotics, such as mitomycin C, bleomycin, anthracyclines and related agents, etc.; antimetabolites, such as capecitabine, hydroxyurea, methotrexate, pemetrexed, pralatrexate, pentostatin, fludarabine, cladribine, gemcitabine, cytarabine, etc.; vinca alkaloids; topotecan; etoposide; taxanes; irinotecan; lenalidomide; eribulin; arsenic trioxide; ixazomib; etc.); and so forth. Indeed, a wide variety of nephrotoxic drugs can induce nephrotoxicity, leading to AKI. Drug-induced nephrotoxicity (and other forms of AKI) can be life-threatening if untreated and can incur enormous costs (to patients, hospitals, and insurers) to treat.

[0479] Embodiments of the present disclosure can include a method of treating or preventing (e.g., prophylactically or in response to at least one event) acute kidney injury (AKI), chronic kidney disease (CKD), or other condition. The method can comprise administering a composition of the present disclosure to a subject in need thereof. For instance, the method can comprise administering to a subject in need thereof, an effective amount of a composition of the present disclosure (e.g., so as to raise and/or maintain a serum soluble Klotho protein concentration of the subject at or above a predetermined threshold for a predetermined period of time). The composition can comprise (i) a therapeutic recombinant Klotho protein or fragment or fusion protein thereof and/or (ii) a product that increases, enhances, augments, and/or supports endogenous Klotho protein production and/or level(s) in a patient to which the product is administered, optionally with one or more additional ingredients or compositions.

[0480] In some embodiments, the condition can comprise: (i) acute tubular necrosis (ATN), acute allergic interstitial nephritis (AAIN), nephritis, glomerulonephritis, and/or nephrotoxicity; or (ii) AKI resulting at least in part from sepsis, kidney transplant or other surgery or medical procedure, acute tubular necrosis (ATN), acute allergic interstitial nephritis (AAIN), nephritis, glomerulonephritis, nephrotoxicity, or low blood pressure. The condition can comprise a drug-induced (e.g., aminoglycosides-induced) nephrotoxicity. The protein can be administered prophylactically, for example, prior to kidney transplant, nephrotoxin administration, or other activity, treatment, or event known or anticipated to cause or contribute to AKI. Alternatively, or in addition, the protein can be administered in response to AM, such as after kidney transplant or other surgery, aminoglycoside or other nephrotoxin administration, or other activity, treatment, or event known or anticipated to cause or contribute to AKI.

[0481] In some embodiments, the nephrotoxin or other drug can be or comprise, for example: one or more aminoglycosides (e.g., paromomycin, tobramycin, gentamicin, amikacin, kanamycin, neomycin, etc.); one or more anti-fungal agents (e.g., amphotericin B, flucytosine, etc.); one or more contrast agents (e.g., (iodinated) radiocontrast media, high-osmolality contrast media (HOCM) having an iodine to molecule ratio of about 1.5 : 1, low-osmolality, nonionic contrast media (LOCM) having an iodine to molecule ratio of about 3:1, isosmolar (isoosmolality) contrast media (IOCM) having an iodine to molecule ratio of about 6:1), etc.); one or more antiretroviral agents (e.g., adefovir, cidofovir, tenofovir, foscarnet, etc.); one or more cancer (or chemo-) therapeutics (e.g., cisplatin, carboplatin, oxaliplatin, alkylating agents (such as bendamustine, cyclophosphamide, ifosfamide, nitrosoureas, temozolomide, melphalan, etc.), antitumor antibiotics (such as mitomycin C, bleomycin, anthracyclines and related agents, etc.), antimetabolites (such as capecitabine, hydroxyurea, methotrexate, pemetrexed, pralatrexate, pentostatin, fludarabine, cladribine, gemcitabine, cytarabine, etc.), vinca alkaloids, topotecan, etoposide, taxanes, irinotecan, lenalidomide, eribulin, arsenic trioxide, ixazomib, etc.); one or more bisphosphonates, or derivatives thereof (e.g., zoledronate/zoledronic acid, ibandronate, alendronate, alendronate/cholecalciferol, etidronate, risedronate (optionally, with calcium carbonate), pamidronate, tiludronate, etc.); and/or one or more narcotics (e.g., opioids), such as cocaine, heroin, etc.);

[0482] Embodiments of the present disclosure can include a method of administering a composition of the present disclosure. The method can include administering the composition of the present disclosure to a human or non-human subject to treat or prevent (prophylactically) AKI or one or more conditions associated with AKI. The method can include determining a level of serum soluble klotho level in the subject, calculating a first dosage of a composition of the present disclosure sufficient to raise the serum soluble klotho level in the subject to a predetermined level or percent of normal levels, administering the first dosage to the subject, such as by oral, bolus or gradual administration, determining a rate of soluble Klotho decline in the serum of the subject, such as following administration of the first dosage, calculating a subsequent dosage time and amount, and/or administering the subsequent dosage of protein to the subject.

### Administration of Compositions to Treat Chronic Kidney Disease (CKD)

[0483] Without being bound to any theory, klotho may be involved in human chronic kidney disease. Soluble Klotho in the circulation starts to decline early in chronic kidney disease (CKD) stage 2 and urinary Klotho possibly even earlier in CKD stage 1. Therefore, soluble Klotho could serve as an early and sensitive marker of kidney function decline. Moreover, preclinical animal data support Klotho deficiency is not just merely a biomarker, but a pathogenic factor for CKD progression and extrarenal CKD complications including cardiovascular disease and disturbed mineral metabolism. Prevention of Klotho decline, re-activation of endogenous Klotho production, or supplementation of exogenous Klotho could all contribute to attenuation of renal fibrosis, retardation of CKD progression, improvement of mineral metabolism, amelioration of cardiomyopathy, and alleviation of vascular calcification in CKD.

[0484] CKD is characterized by progressive deterioration of renal function with high risk of ESRD. CKD risk increases with age, and about half of the CKD stageΔ3 cases occurs in subjects>or =70 years old. CKD can be viewed as a state of accelerated aging. The relative risk for cardiovascular mortality of a 25 to 34-year-old dialysis patient is similar to a non-CKD patient of >or =75 years of age. Cardiovascular disease is the principal killer in CKD and ESRD patients. CKD and ESRD patients have low renal Klotho expression and low levels of circulating Klotho. Renal Klotho deficiency in early stages of CKD may be attributed mainly to suppression of Klotho expression rather than loss of viable renal tubules. Furthermore, some dialysis patients still have detectable circulating Klotho, suggesting that renal Klotho expression is not completely suppressed, and Klotho may come from extra-renal source(s), although its origin is not clear to date. Establishing extra-renal sources of Klotho and characterizing how these can be up-regulated when renal production fails is of paramount importance.

[0485] Administration of compositions of the present disclosure can help to prevent, retard, and decrease the burden of comorbidity in CKD.

### Administration of Compositions to Treat Gut Diseases and Related Conditions

[0486] Without being bound to any theory, Interstitial Cells of Cajal (ICCs) are interstitial cells that are between other cells in the GI tract with an ongoing function in controlling peristalsis. ICCs (main) function may be to create the electrical signals that control the rhythmic smooth muscle contraction in the gut (different regions of the gastrointestinal system have different frequencies of contraction called peristalsis). ICCs may guide the migration of mesenchymal stem cells in the gut (and many other organs).

[0487] In the gut, ICCs may produce and/or become activated by klotho, leading to optimized regenerative processes. In Klotho knockout mice, ICCs are diminished, leading to impairment of the peristaltic process, mimicking gut disorders that occur in older humans.

[0488] Administration of compositions of the present disclosure can help to prevent, retard, and decrease impairment of the peristaltic process and/or augment, support, and/or optimize the regenerative processes, at least in the gut. These effects may further support gut health and/or prevent, retard, and decrease the occurrence and/or severity of gut diseases and related conditions.

### Therapeutic Treatment of Age-Related Conditions

[0489] Investigators have discovered an association between Klotho and biological parameters commonly accepted as indicators of the clinical status in hospitalized older patients. The investigators genotyped the single-nucleotide polymorphisms (SNPs) rs9536314, rs1207568, and rs564481 at the KL locus in 594 hospitalized older patients (65-99 years), consecutively attending a geriatric ward, and tested the association of these KL variants with biological quantitative traits using analyses of covariance and genetic risk score models. Significant associations of rs9536314 with serum levels of hemoglobin, albumin, and high-density lipoprotein cholesterol (HDL-C) as well as significant associations of rs564481 with serum levels of hemoglobin, fasting insulin, and fasting glucose were observed. Gender-segregated analyses confirmed these associations and suggests that the associations of KL genotypes with HDL-C, fasting glucose and fasting insulin levels may be driven by the female gender, while the association with serum levels of hemoglobin may be driven by the male gender. The association of KL genotypes with creatine levels was found in females, while the association with insulin-like growth factor-1 (IGF-1) and lymphocytes count (LC) was found in males. The genetic risk score (GRS) models further confirmed significant associations among KL SNPs and hemoglobin, total cholesterol, and HDL-C. Gender-segregated analyses with the GRS-tagged approach confirmed the associations with HDL-C, fasting glucose, and fasting insulin levels in females, and with hemoglobin and LC in males. The findings suggested that KL locus may influence quantitative traits such as serum levels of lipid, fasting glucose, albumin and hemoglobin in hospitalized older patients, with some gender differences suggested for creatine, IGF-1 levels, and LC, thus being one of the genetic factors possibly contributing to age-related diseases and longevity.

[0490] Embodiments of the present disclosure can include administering a composition of the present disclosure to a subject in need thereof (e.g., an individual or patient, optionally elderly and/or suffering from an aging-related condition, low endogenous s-Klotho protein expression, and/or symptoms of age-related condition or decreased longevity). Administration of the composition(s) of the present disclosure can lead to a beneficial increase in blood s-Klotho levels. The administration may reverse or counteract the deleterious effects of the aging-related condition and/or influence, in a positive therapeutic manner, quantitative traits such as serum levels of total cholesterol, HDL-C, fasting glucose, fasting insulin, albumin, creatine, IGF-1, hemoglobin, and lymphocytes count (e.g., in hospitalized and/or elderly patients).

### Prophylactic Composition Administration

[0491] In addition to the foregoing, embodiments of the present disclosure can include administering a composition of the present disclosure to an individual or subject in need thereof for prophylactic purposes and/or maintenance of certain health attributes. For example, administration of certain compositions of the present disclosure can help maintain youthfulness in optionally aging patients not yet suffering from a diagnosed aging-related condition. Accordingly, while certain embodiments of the present disclosure can relate to and/or comprise treating a condition in a patient, other embodiments can relate to and/or comprise preventing, inhibiting development of, and/or prophylactically addressing one or more conditions.

### Administration of Exogenous S-Klotho to Treat Genetic Defects

[0492] An exemplary embodiment of the present disclosure relates to the administration of exogenous S-Klotho to treat (e.g., correct) known human genetic defects. For example, a 13-year-old girl with familial tumoral calcinosis and a Klotho mutation has been reported. Familial tumoral calcinosis is an autosomal recessive metabolic disease characterized by ectopic calcifications and hyperphosphatemia due to inactivating mutations in FGF23 or GALNT3. FGF23 is a hormone necessary for the renal excretion of phosphate, while GALNT is an enzyme contributing to the maturation and secretion of FGF23. A homozygous mutation in the klotho gene has been identified in the 13-year old girl. Klotho encodes a secreted protein necessary to the transmission of the signal emitted by FGF23 toward its receptors. The administration of exogenous human recombinant S-Klotho constitutes a highly targeted and effective therapy to address the malfunction and symptoms associated with familial tumoral calcinosis.

Compositions and Treatments Including S-Klotho and/or Supplement in Combination with other Component(s)

[0493] In at least one embodiment, a composition, medicament, dosage, or therapeutic treatment can include a therapeutic human recombinant soluble alpha Klotho (S-Klotho) protein and a natural supplement composition that increases endogenous Klotho production or one or more component thereof. Klotho, whether endogenous or exogenous (recombinant) can also act in an additive or synergistic matter with other compounds and/or components to influence one or more aspects of human health and well-being. For instance, treatments that include a therapeutic human recombinant soluble alpha Klotho (S-Klotho) protein, and/or natural supplement composition that increases endogenous Klotho production, in combination and/or concurrently with one or more additional active components can benefit human patients. Such treatments can be prophylactic or responsive to any human condition on which the Klotho protein and/or other component(s) can have a therapeutic effect. Such conditions can include, for example, an age-related condition, a clinical (e.g., metabolic) condition, a chronic or acute condition, and so forth. Specific, non-limiting examples of specific conditions are disclosed herein.

[0494] S-klotho may exist in the human body along with other blood borne anti-aging compound such as growth/differentiation factor 11 (GDF-11). Accordingly, in certain embodiments, therapeutic S-klotho can be co-administered (e.g., concurrently, sequentially, and/or in combination) with therapeutic GDF-11. Such administration can have additive or synergistic anti-aging or other effects in some embodiments. Likewise, the co-administration S-klotho to human subjects with (neutralizing) antibodies to or suppressor of CCL11 may work in unison to counter aging or other condition (as CCL11 (also known as eotaxin-1) is understood to be a negative regulator of stem cell rejuvenation). S-klotho can also or alternatively be co-administered with other eotaxins, such as eotaxin-2 (CCL24) and/or eotaxin-3 (CCL26).

[0495] In some embodiments, S-klotho can be co-administered with suppressors of or antibodies to Transforming Growth Factor β-1 (TGF-β1). S-klotho administration may oppose the action of the TGF-β1 signal pathways involved in an endogenous anti-cellular epithelial-to-mesenchymal transition (anti-EMT) that leads to renal and other tissue fibrosis. Anti-EMT is also relevant in cancer cells where inhibiting EMT may confer on cancer cells the ability to metastasize—this latter process is understood to be opposed by klotho. Accordingly, co-administration of S-klotho and a suppressor of or antibody to Transforming Growth Factor β-1 (TGF-β1) can have synergistic or additive effects.

[0496] In some embodiments, S-klotho can be co-administered with antibodies to or suppressors of Insulin Growth Factor-1 (IGF-1). Klotho is understood to be a hormone that inhibits the intracellular insulin/IGF-1 signaling cascade, and this inhibition increases resistance to oxidative stress at the cellular and organismal level in mammals; a mechanism which is considered to be evolutionarily conserved for extending life span. Accordingly, co-administration of S-klotho and a suppressor of or antibody to Insulin Growth Factor-1 (IGF-1) can have synergistic or additive effects.

[0497] In some embodiments, S-klotho can be administered in combinations with vitamin D (e.g., Vitamin D3) or 1,25-dihydroxyvitamin D₃[1,25(OH)₂D₃], FGF-15, FGF-19, and/or Klotho β; since numerous studies have revealed a comprehensive regulatory scheme of mineral homeostasis involving the mutually regulated positive/negative feedback actions of Klotho α-K1, FGF23, and 1,25(OH)₂D and/or an analogous regulatory network composed of Klotho β-K1, FGF15/humanFGF19, and bile acids that regulate bile acid/cholesterol metabolism. Such co-administration can have synergistic or additive effects on numerous conditions and/or processes in the body. In some embodiments, S-klotho can be administered in combinations with FGF-21,

[0498] In some embodiments, S-klotho can be co-administered with carbonic anhydrase inhibitors, such as acetazolamide, methazolamide, dichlorphenamide, dorzolamide, brinzolamide, and/or topiramate. Such combinatorial administration can be useful in the treatment of ankylosing spondylitis (AS), rheumatoid arthritis (RA), and a variety of other conditions. Various investigations have shown that increased bone resorption is a characteristic of AS and RA and that carbonic anhydrase inhibitors play an antiarthritic role by inhibiting bone resorption. At the bone level, through a different mechanism, S-klotho stimulates bone resorption and phosphate release by acting on TRPV5, which is a recently identified osteoclast function modulator. Increased levels of 1,25(OH)₂D₃ caused by S-Klotho administration can also stimulate osteoclast differentiation and bone resorption and, thereby, phosphate release. Thus, co-administration of S-Klotho and carbonic anhydrase inhibitors can have an additive or synergistic effect, especially in promoting bone health, particularly in AS and RA.

[0499] S-Klotho can be administered in combination with one or more disease-modifying antirheumatic drugs (DMARDs)—for the treatment of severe active rheumatoid arthritis.

[0500] S-Klotho can be administered in combination with cyclosporine, since cyclosporine decreases klotho mRNA and protein and increases oxidative stress leading to cyclosporine induced-renal injury (CsA). The associated decrease of klotho mRNA and protein and increases oxidative stress can be countered by exogenous co-administration of S-Klotho.

[0501] In some embodiments, S-klotho can be co-administered with losartan and/or cyclosporine. Treatment with losartan, an angiotensin II type 1 (AT1) receptor blocker, reversed the decrease in klotho expression seen with cyclosporine. Losartan also produced a concurrent improvement in renal histology (with losartan decreasing the tubulointerstitial fibrosis that is caused by cyclosporine).

[0502] In some embodiments, S-klotho can be co-administered with one or more aminoglycosides, such as amikacin, gentamicin, tobramycin, etc. Such treatment can be useful to prevent nephrotoxicity and/or acute kidney injury (AKI) when aminoglycosides are used to treat (gram-negative) pathogen infection, which may greatly expand the use of aminoglycosides to treat infections. The administration of S-Klotho with verapamil and/or diltiazem, which have been used to block AKI, can be therapeutic in the treatment and/or prevention of renal dysfunction from AKI.

[0503] In some embodiments, S-klotho can be co-administered with testosterone or androgen receptor (AR) up-regulating compounds. Recent reports indicate no beneficial effect of testosterone treatment in men in regards to personality, psychological well-being, or mood is observed. In addition, the prescription of testosterone supplementation for low-T for cardiovascular health, sexual function, physical function, mood, or cognitive function was considered to be without support from randomized clinical trials. However, testosterone supplementation was consistently found to increase muscle strength but did not have beneficial effects on physical function. S-Klotho administration in combination with testosterone and/or androgen receptor (AR) up-regulating compounds can significantly increase muscle strength and/or physical function in elderly, frail, or low-T men beyond any effect that testosterone or S-Klotho may have alone in these treatment groups.

[0504] In some embodiments, S-klotho can be co-administered with estrogen or an estrogen hormone (e.g., estradiol, estriol, estrone, etc.). Such co-administration can improve health indicators in women (e.g., menstrual, menopausal, or menopausal transitioning women) and/or treat infertility, polycystic ovarian disease or disorder, obesity, hormone imbalance and related conditions, and/or other female health conditions.

[0505] In some embodiments, S-klotho can be co-administered with one or more nootropics—also called smart drugs or cognitive enhancers. Nootropics drugs, supplements, and/or other substances can improve cognitive function, particularly executive functions, memory, creativity, motivation, task saliency (motivation to perform a task), performance (especially on tedious tasks that require a high degree of effort), and can be useful in treating cognitive or motor function difficulties attributable to disorders such as Alzheimer's disease, Parkinson's disease, Huntington's disease, and ADHD. The most commonly used class of drug that is known to improve some aspect of cognition is stimulants, especially the classes of stimulants that demonstrate cognition-enhancing effects in humans by acting as direct agonists or indirect agonists of dopamine receptor D1, adrenoceptor A2, or both receptors in the prefrontal cortex. Stimulants include, for example: amphetamines (e.g., amphetamine, dextroamphetamine, lisdexamfetamine, etc.), which can benefit a range of cognitive functions (e.g., inhibitory control, episodic memory, working memory, and aspects of attention), especially in individuals with ADHD; dimethylamylamine (DMAA), such as 1,3-dimethylamylamine, which can improve physical performance, alertness, reaction time, etc.; methylphenidate—a substituted phenethylamine that can improve a range of cognitive functions (e.g., working memory, episodic memory, and inhibitory control, aspects of attention, and planning latency); eugeroics (e.g., armodafinil, modafinil, etc.), which can function as wakefulness promoting agents that can increase alertness, particularly in sleep deprived individuals, facilitate reasoning and problem solving, treat narcolepsy, shift work sleep disorder, and daytime sleepiness remaining after sleep apnea treatments, and so forth; xanthines (e.g., caffeine, etc.), which can increase alertness, performance, and/or memory; nicotine, and so forth.

[0506] In some embodiments, S-klotho can be co-administered with one or more osteoporosis and/or osteopenia medications, as known in the art. Klotho may play a role in regulating bone mineral density, as the absence of Klotho can lead to reduced bone mineral density in animals. For instance, Klotho knockout mice show reduced bone mineral density over time. Klotho expression can rescue bone defect, such as reduced bone mineral density shown by Klotho knockout mice over time. Epidemiological studies have shown associations between various Klotho gene variants and changes in bone mineral density and prevalence of hand osteoarthritis.

[0507] S-Klotho can be administered in combination with one or more anti-cancer treatments and/or preventions, such as a chemotherapeutic. In lung cancers, such as non-small cell lung cancer (NSCLC), for example, S-klotho administration can affect the resistance of lung cancer cells to cisplatin and/or other chemotherapy. In addition, S-klotho can function as a potential tumor suppressor in lung cancer, gastric cancer, pancreatic cancer (adenocarcinoma), and other forms of cancer. S-Klotho can be administered in combination with sorafenib chemotherapy for the treatment of hepatocellular carcinoma (HCC). Overexpression of klotho as well as treatment with soluble klotho protein can reduce hepatoma cell growth in vitro and in vivo. Other cancer types that can be treated with S-klotho co-administration include hepatocellular carcinoma (HCC), central nervous system (CNS) cancers (e.g., brain (e.g., glioma, craniopharyngioma, medulloblastoma and meningioma), spinal cord, and other tumors, lymphoma, etc.), (metastatic) colon cancer, and so forth.

[0508] S-Klotho can also be administered in combination with chemotherapeutic(s) to treat chemotherapy-induced frailty in cancer patients. S-Klotho can also be administered to treat cancer-induced frailty in cancer patients following other known treatments.

[0509] S-Klotho can be administered in combination with kidney dialysis or other procedures. S-Klotho can be administered to treat frailty in dialysis patients, as frailty is associated with poor outcomes for patients on dialysis.

[0510] S-Klotho can be administered in combination with one or more Alzheimer's Disease treatment or preventions, or with brain-derived neurotrophic factor (BDNF), as an adequate amount of BDNF can help to develop and maintain normal neuronal circuits in the brain.

[0511] S-Klotho can be administered in combination with one or more molecules that increase the ability of klotho to cross the blood-brain barrier in order to increase the ability of klotho to enter the central nervous system (CNS) to treat or prevent CNS-relates conditions. For example, neither S-Klotho nor BDNF are known to cross the blood-brain barrier. Embodiments of the present disclosure include utilizing blood-brain barrier delivery techniques for the administration of S-klotho and/or S-klotho with BDNF to the CNS to treat Alzheimer's Disease and/or improve cognition in individuals not affected by Alzheimer's Disease.

[0512] S-Klotho can be administered in combination with 5′ adenosine monophosphate-activated protein kinase (AMPK) or AMPK activating drugs or ingredients that positively regulate signaling pathways that replenish cellular ATP supplies, including fatty acid oxidation and autophagy; or that negatively regulate ATP-consuming biosynthetic processes including gluconeogenesis, lipid and protein synthesis.

[0513] S-Klotho can be administered in combination with one or more anti-diabetic drugs such as insulin, phloridzin or the antioxidant tiron and these combination treatments may have merit in the prevention of renal damage from oxidative stress produced in diabetic disorders. The co-administration of S-Klotho with other antidiabetic drugs for type 1 diabetes can protect β-cells by inhibiting β-cell apoptosis through activation of the integrin β1-FAK/Akt pathway, leading to inhibition of caspase 3 cleavage.

[0514] S-Klotho can be administered in combination with one or more type 2 anti-diabetes drugs such as metformin for improving glycemic control and vascular function in overweight and obese diabetic subjects.

[0515] S-Klotho can be administered in combination with one or more blood pressure medications, calcium regulators, or treatments or preventions of chronic kidney disease (CKD). For example, soft-tissue calcification is a prominent feature in CKD and Klotho can ameliorate vascular calcification by enhancing phosphaturia, preserving glomerular filtration, and directly inhibiting phosphate uptake by vascular smooth muscle.

[0516] S-Klotho can be administered in combination with TM5441 or other inhibitors of PAI-1 (plasminogen activator 1), since it is thought that PAI-1 inhibition or deficiency retards the development of senescence and protects organ structure and function while prolonging the lifespan of Klotho-deficient (kl/kl) mice.

[0517] S-Klotho can be administered in combination with sirtuinl (SIRT1) or SIRT1-activating compounds (STACs) such as resveratrol. SIRT1, a type III protein deacetylase, is thought to be a novel anti-aging protein involved in regulation of cellular senescence/aging and inflammation. SIRT1 level and activity are decreased during lung inflammation caused by oxidative stress. The mechanism of SIRT1-mediated protection against inflammation is associated with the regulation of inflammation, premature senescence, telomere attrition, senescence associated secretory phenotype, and DNA damage response. A variety of dietary polyphenols and pharmacological activators are shown to regulate SIRT1 so as to intervene the progression of type 2 diabetes, cancer, cardiovascular diseases, and chronic obstructive pulmonary disease associated with inflammation. Thus some or all of the health benefits of SIRT-1 may be augmented by co-administration of SIRT1 and/or SIRTI-activating compounds given with S-Klotho.

[0518] S-Klotho can be administered in combination with one or more Human Cells, Tissues, and Cellular and Tissue-Based Products (HCT/Ps), as recognized by the FDA. Such products can include, for example, one or more of bone (including demineralized bone, ligaments, tendons, fascia, cartilage, ocular tissues (corneas & sclera), skin, vascular grafts (veins and/or arteries), optionally (or other than) preserved umbilical cord veins, pericardium, amniotic membrane (when used alone (—without added cells—) for ocular repair), dura mater, heart valve allografts, hematopoietic stem cells derived from peripheral or umbilical cord blood, semen, oocytes, or embryos. In at least one embodiment, the HCT/P can be or comprise one or more stem cells. Stem cell treatment for damaged bodily tissues and organs continues to grow in popularity. Administration of therapeutic, recombinant Klotho protein in combination with stem cells provided surprising, unexpected, and even synergistic outcomes for subjects in need thereof.

[0519] Embodiments of the present disclosure further include a combination product, comprising a therapeutic, recombinant Klotho protein in combination with human stem cells. The composition can also include a pharmaceutically-acceptable carrier as described herein. Such compositions can comprise or be classified as regenerative medicines, to treat, modify, reverse, or cure a serious or life-threatening disease or condition, as recognized by the FDA. Preliminary clinical evidence indicates that the composition (drug) has the potential to address unmet medical needs for such disease or condition.

[0520] Illustratively, stem cells can be or comprise mesenchymal stem cells (MSCs), such as from human umbilical cords or placentas. In at least one embodiment, the composition comprising huMSCs and a therapeutic, recombinant Klotho protein of the present disclosure attenuated the inflammatory and oxidative stress responses occurring in AKI, and/or reduced the expression of senescence-related proteins and microRNAs.

[0521] S-Klotho can be administered in combination with one or more senescence inhibitors. For instance, Klotho protein can be combined with Pin1-FOXM1 and/or other senescence inhibitors to enhance outcomes in patients receiving such treatment.

[0522] S-Klotho can be administered in combination with one or more of the following: Klotho stimulators (e.g., Vit. D, Losartan, Testosterone), GDF-11, Trichostatin A anti-fungal (e.g., GDF- 11 Stimulator), TIMP-2, CCL- 11 Inhibitor/antibodies, D as atinib, Nicotinamide Riboside (e.g., NAD+), nicotinamide mononucleotide (NMN) (e.g., NDA+), AMPK Stimulators (e.g., Resveratrol, Aspirin, Salicylate, phytochemicals, DR), C60 Fullerene, Rapamycin, FGF inhibitor, Senolytics drugs/compounds such as FOXO4-p53 interfering peptides (e.g. FOXO4-DRI), inhibitors of the anti-apoptotic proteins BCL-2 and BCL-xL.

[0523] Any of the foregoing or other treatments or co-administrations can have additive or synergistic effects over those of any of the treatments alone. For instance, co-administration of a Klotho protein with one or more of the foregoing can result in treatment outcomes greater than the sum of the individual outcomes of administering the components alone at similar concentrations. In addition, synergistic effects can include treatment outcomes similar to those of the individual outcomes of administering the components alone, but at lower concentrations. Synergistic effects can also include increasing the maximum effective dose of one or more of the components, reducing toxicity of one or more of the components, or any other beneficial result that is more than a mere additive effect of the individual treatment outcomes. In addition, additive effects of the individual treatment outcomes can comprise one or more synergistic effects. Such additive/synergistic effects may not be predicted or expected given the nature and understanding of the individual components.

[0524] As used herein, a combination treatment or co-administration can include treatment or administration of a combination product, composition, or formulation comprising a Klotho protein and one or more additional active ingredients. The one or more additional active ingredients can be selected from among the components, drugs, substances, treatment compositions, etc. described herein or others known in the art. For instance, the Klotho protein and one or more additional active ingredients can be co-formulated into an injectable (e.g., intramuscular, intravenous, etc.), ingestible, transdermal, inhalable, topical, or other formulation.

[0525] Alternatively, a combination treatment or co-administration can include treatment or administration of a Klotho protein and one or more additional active ingredients, but without the Klotho protein and one or more additional active ingredients being combined or formulated into a combination product, composition, or formulation. For instance, the Klotho protein and one or more additional active ingredients can each comprise or be in a separate injectable (e.g., intramuscular, intravenous, etc.), ingestible, transdermal, inhalable, topical, or other formulation.

[0526] It will also be appreciated that co-administration can comprise simultaneous administration of two or more components or distinct administrations of two or more components, the distinct administrations preferably being separated by a period of time. The period of time can be very small, in some embodiments. For instance, a second component of the Klotho protein and one or more additional active ingredients can be administered (e.g., injected) substantially, immediately following administration of a first component of the Klotho protein and one or more additional active ingredients. Alternatively, the first and second administrations can be separated by a time period of 1-60 seconds, 1-60 minutes, 1-24 hours, 1-7 days, 1-4 weeks, 1-12 months, and so forth, or any value or range of values therebetween. Similarly, simultaneous administration can include overlapping administration timeframes for the two or more components.

### Therapeutic Treatment of Hyperphosphatemic Familial Tumoral Calcinosis (HFTC)

[0527] In affected human individuals, HFTC is caused by a histidine (H) to arginine (R) mutation at amino acid (AA) position 193 of S-Klotho—rs121908423. Without being bound to any theory, it is thought that the H193R mutation in HFTC individuals impairs the ability of S-Klotho to form a ternary complex with FGF23 and FGFR1c, which impairs KL-dependent FGF23 signaling. As a result, affected subjects present a severe metabolic disorder that manifests with hyperphosphatemia and massive calcium deposits in the skin and subcutaneous tissues. Some patients manifest recurrent, transient, painful swellings of the long bones associated with the radiographic findings of periosteal reaction and cortical hyperostosis and absence of skin involvement.

[0528] An embodiment of the present disclosure includes a S-Klotho protein having H193. The H193 protein can be produced or expressed in the context of any protein construct described herein. For instance, the H193 variant can be produced or expressed in the context of S-Klotho, isoform 1 or 2, 1-981, 29-981, 34-981, 36-981, 131-981, 1-549, 29-549, 34-549, 36-549, 131-549, and so forth, with or without a tag (e.g., Fc tag, TEV-Twin-Strep tag, TEV sequence, etc.). Accordingly, the nucleic acid construct or cDNA from which the protein is expressed can be of corresponding configuration.

[0529] Embodiments can include producing a H193 heterozygous or homozygous variant construct, transferring (e.g., via transfection) the resulting construct, which encodes the S-Klotho H193 protein, into an appropriate expression system (e.g., CHO cells), and/or transiently expressing the S-Klotho H193 protein. The H193 Klotho protein may also be expressed at higher levels than the R193 (or H193R) protein. Embodiments can include purifying (and optionally quality-control testing) the expressed protein for therapeutic administration. Embodiments can include administering a therapeutic or therapeutically-effective amount of the S-Klotho H193 protein to a subject in need thereof (e.g., HFTC individuals, individual diagnosed with HFTC, or patient harboring the H193R (rs121908423) or other variant). Alternatively, the subject may be of wild-type of other mutant or variant type. Administration of the recombinant S-Klotho H193 protein can lead to a beneficial increase in blood S-Klotho levels. The administration may reverse or counteract the deleterious effects of the R193 mutation that is transcribed and circulated in HFTC individuals as a result of the H-to-R193 point mutation found in the human klotho gene in individuals affected with HFTC. Accordingly, the circulating concentration of S-Klotho H193 may help to counter the effects observed in H193R or HFTC individuals.

Therapeutic Treatment in CC Genotype Patients with End-Stage Renal Disease (ESRD)

[0530] Approximately 350,000 patients with end-stage renal disease (ESRD) suffer exceptionally high mortality rates in their first year of chronic hemodialysis. Both vitamin D and fibroblast growth factor (FGF)-23 levels correlate with survival in these patients. Without being bound to any theory, Klotho is a protein in the vitamin D/FGF-23 signaling pathway that has been linked with accelerated aging and early mortality in animal models. It has been hypothesized that genetic variation in the Klotho gene may be associated with survival in subjects with ESRD. Investigators tested the association between 12 single nucleotide polymorphisms (SNPs) in the Klotho gene and mortality in a cohort of ESRD patients during their first year on hemodialysis (n=1307 white and Asian). A significant association was discovered between the CC genotype of one tag SNP, rs577912 (a common HapMap variant with a minor allele frequency [MAF]>0.05 within the Klotho gene sequence located in intron 1), and increased risk for 1-yr mortality (RR, 1.76; 95% CI, 1.19-2.59; p=0.003). This effect in individuals with the CC genotype was even more marked among patients who were not treated with activated vitamin D supplementation (HR, 2.51; 95% CI, 1.18-5.34; p=0.005). In lymphoblastoid cell lines derived from HapMap subjects, the CC genotype was associated with a 16-21% lower Klotho expression compared with the AA or AC genotypes. However, none of the rs577912 SNPs nucleotide change described above result in an amino acid change in the Klotho protein. Accordingly, this functional SNP (rs577912) may quantitatively affect Klotho gene expression at the mRNA level.

[0531] An embodiment of the present disclosure includes a S-Klotho protein expressed from the AA or AC genotype. The protein can be produced or expressed in the context of any protein construct described herein. For instance, the protein can be produced or expressed in the context of S-Klotho, isoform 1 or 2. 1-981, 29-981, 34-981, 36-981, 131-981, 1-549, 29-549, 34-549, 36-549, 131-549, and so forth, with or without a tag (e.g., Fc tag, TEV-Twin-Strep tag, TEV sequence, etc.). Accordingly, the nucleic acid construct or cDNA from which the protein is expressed can be of corresponding length.

[0532] Embodiments can include producing a AA or AC heterozygous or homozygous construct, transferring (e.g., via transfection) the resulting construct, which encodes the S-Klotho protein, into an appropriate expression system (e.g., CHO cells), and/or transiently expressing the S-Klotho protein. Klotho protein expressed in AA or AC heterozygous or homozygous cells may be expressed at higher levels than in CC cells. Embodiments can include purifying (and optionally quality-control testing) the expressed protein for therapeutic administration. Embodiments can include administering a therapeutic or therapeutically-effective amount of the S-Klotho protein to a subject in need thereof (e.g., an individual or patient harboring the CC mutation at the one tag SNP, rs577912, having low endogenous S-Klotho protein expression, and/or with end-stage renal disease (ESRD)). Alternatively, the subject may be of wild-type of other mutant or variant type. Administration of the recombinant S-Klotho protein can lead to a beneficial increase in blood S-Klotho levels. The administration may reverse or counteract the deleterious effects of the CC mutation that is transcribed and circulated in individuals as a result of the point mutation(s) found in the human klotho gene in affected individuals. Accordingly, the circulating concentration of S-Klotho may help to counter the effects observed in CC individuals, especially those with end-stage renal disease (ESRD), namely mortality in the first year in ESRD patients undergoing chronic hemodialysis.

### Therapeutic Treatment of Radiographic Hand Osteoarthritis (OA) and Osteophyte

[0533] Osteoarthritis (OA) is a common complex disease with strong heritable components. Investigators studied the association between four putatively functional genetic variants in klotho gene and hand OA in a large female Caucasian population. The investigators found significant association between SNP G-395A and the presence/absence of radiographic hand OA and osteophyte formation. Allele G significantly increased the risk for radiographic hand OA and osteophytes with odds ratios (ORs) of 1.44 (P=0.008, 95% confidence interval (CI) 1.09-1.91) and 1.36 (P=0.006, 95% CI 1.09-1.70), respectively. From logistic regression modelling, genotype GG showed more than three-fold increased risk for both radiographic hand OA (OR=3.10, 95% CI 1.10-8.76) and osteophyte (OR=3.10, 95% CI 1.10-8.75) when compared to genotype AA. After adjustment for age, ORs for genotype GG further increased to 4.39 (P=0.006, 95% CI 1.51-12.74) for radiographic hand OA and to 4.47 (P=0.005, 95% CI 1.56-12.77) for osteophytes. The investigators also suggested that one variant (SNP G-395A) in the klotho gene is associated with the susceptibility of hand OA and appears to act through osteophyte formation rather than cartilage damage.

[0534] An embodiment of the present disclosure includes a S-Klotho protein expressed from a construct having SNP G395A. The resulting protein can be produced or expressed in the context of any protein construct described herein. For instance, the A395 variant can be produced or expressed in the context of S-Klotho, isoform 1 or 2, 1-981, 29-981, 34-981, 36-981, 131-981, 1-549, 29-549, 34-549, 36-549, 131-549, and so forth, with or without a tag (e.g., Fc tag, TEV-Twin-Strep tag, TEV sequence, etc.). Accordingly, the nucleic acid construct or cDNA from which the protein is expressed can be of corresponding length.

[0535] Embodiments can include producing a G395A heterozygous or homozygous construct, transferring (e.g., via transfection) the resulting construct, which encodes the S-Klotho protein, into an appropriate expression system (e.g., CHO cells), and/or transiently expressing the S-Klotho protein. Klotho protein expressed in A395 heterozygous or homozygous cells may be expressed at higher levels than in G396 cells. Embodiments can include purifying (and optionally quality-control testing) the expressed protein for therapeutic administration. Embodiments can include administering a therapeutic or therapeutically-effective amount of the S-Klotho protein to a subject in need thereof (e.g., an individual or patient harboring the G395 SNP and/or (at risk of developing) radiographic hand osteoarthritis (OA) and/or osteophytes). Alternatively, the subject may be of wild-type of other mutant or variant type. Administration of the recombinant S-Klotho protein can lead to a beneficial increase in blood S-Klotho levels. The administration may reverse or counteract the deleterious effects of the G395 SNP that is transcribed and circulated in affected individuals. Accordingly, the circulating concentration of S-Klotho may help to counter the effects observed in G395 individuals, especially those at risk of developing radiographic hand osteoarthritis (OA) and/or osteophytes. Administration of the G-395A S-Klotho protein may, therefore, decrease the risk of radiographic hand osteoarthritis (OA) and osteophyte formation in patients (e.g., patients harboring the G395 SNP.

### Therapeutic Treatment of Metabolic Syndrome

[0536] The risk and/or incidence of metabolic syndrome (MetS), a cluster of cardiometabolic risk factors including abdominal obesity, hyperglycemia, dyslipidemia and hypertension, increases with age. In elderly adults, MetS not only increases the risk of cardiovascular diseases and type 2 diabetes, but also is associated with cognitive decline and disability. Current evidence suggests that MetS is partly heritable, and genetic factors play a greater role than environment factors on the incidence of MetS. Investigators discovered an association between the G-395A polymorphism and metabolic syndrome (MetS) among a population of Chinese nonagenarians and centenarians. Subjects were from the Project of Longevity and Aging in Dujiangyan (PLAD). The genotyping of G-395A (rs1207568) in the promoter region of the Klotho gene was performed using the TaqMan allelic discrimination assay. MetS was diagnosed according to the International Diabetes Federation criteria. Included were 695 subjects aged 93.5±3.2 years. G and A allele frequencies were 0.852 and 0.148, respectively. In the whole population, the frequency of MetS was 10.8% and 5.9% in the GG and GA+AA genotype group, respectively (p=0.004). The −395A allele carriers had significantly lower risk of MetS in the whole population (odds ratio [OR] 0.50, 95% confidential interval [CI] 0.25 to 0.98) and in women (OR 0.51, 95% CI 0.24 to 0.97), but not in men (OR 0.42, 95% CI 0.05 to 3.85). In the whole population and women, the relationship between the Klotho G-395A SNP and MetS might be due to its influence on high blood pressure (OR 0.48, 95% CI 0.34 to 0.67; OR 0.47, 95% CI 0.31 to 0.71, respectively) and hypertriglyceridemia (OR 0.66, 95% CI 0.39 to 0.95; OR 0.54, 95% CI 0.31 to 0.98, respectively). In men, this relationship might be due to its influence on high blood pressure (OR 0.47, 95% CI 0.25 to 0.90) and low HDL-C (OR 0.69, 95% CI 0.27 to 0.93).

[0537] Investigators concluded that the -395A allele carriers of the Klotho gene were correlated with lower risk of MetS among Chinese nonagenarians and centenarians, especially in women.

[0538] An embodiment of the present disclosure includes a S-Klotho protein expressed from a construct having the −395A allele. The resulting protein can be produced or expressed in the context of any protein construct described herein. For instance, the A395 allele can be produced or expressed in the context of S-Klotho, isoform 1 or 2, 1-981, 29-981, 34-981, 36-981, 131-981, 1-549, 29-549, 34-549, 36-549, 131-549, and so forth, with or without a tag (e.g., Fc tag, TEV-Twin-Strep tag, TEV sequence, etc.). Accordingly, the nucleic acid construct or cDNA from which the protein is expressed can be of corresponding length.

[0539] Embodiments can include producing a -395A heterozygous or homozygous construct, transferring (e.g., via transfection) the resulting construct, which encodes the S-Klotho protein, into an appropriate expression system (e.g., CHO cells), and/or transiently expressing the S-Klotho protein. Klotho protein expressed in A395 heterozygous or homozygous cells may be expressed at higher levels than in G396 cells. Embodiments can include purifying (and optionally quality-control testing) the expressed protein for therapeutic administration. Embodiments can include administering a therapeutic or therapeutically-effective amount of the S-Klotho protein to a subject in need thereof (e.g., an individual or patient harboring the G395 SNP and/or (at risk of developing) metabolic syndrome (MetS). Alternatively, the subject may be of wild-type of other mutant or variant type. Administration of the recombinant S-Klotho protein can lead to a beneficial increase in blood S-Klotho levels. The administration may reverse or counteract the deleterious effects of the G395 SNP that is transcribed and circulated in affected individuals. Accordingly, the circulating concentration of S-Klotho may help to counter the effects observed in G395 individuals, especially those at risk of developing metabolic syndrome (MetS). Administration of the G-395A S-Klotho protein may, therefore, decrease the risk of metabolic syndrome (MetS) in patients (e.g., patients harboring the G395 SNP, in elderly human, and/or in women).

### Therapeutic Treatment of Cancer

[0540] S-Klotho is thought to inhibit basal Wnt signaling activity, thereby functioning as a tumor suppressor for colorectal cancer (CRC). In addition, klotho gene variants associated with lifespan differences may repress butyrate-mediated Wnt hyperactivation, and thus increase the risk of CRC. It has been hypothesized that in this manner, the type of klotho variant present, and its relative expression, can interact with levels of butyrate derived from diet to modify CRC risk. Moreover, mTOR signaling has also been linked to human aging, and crosstalk between Wnt and mTOR signaling may influence colonic tumorigenesis

[0541] The KL-VS variant or other construct can serve as a vehicle for investigating which SNPs (e.g., within KL-VS) are responsible for influencing S-Klotho to produce a decrease in basal Wnt signaling and/or the suppression of butyrate-mediated Wnt hyperactivation—the latter Wnt-related activities which have been associated with S-Klotho tumor suppression. Embodiments include modifying the appropriate amino acids (e.g., in the KL-VS stretch of S-Klotho) shown to influence the tumor suppressing action of the KL-VS variant. An embodiment of the present disclosure includes a recombinant S-Klotho protein having one or more amino acid alterations in the KL-VS stretch of 6 SNPs. The proteins can be produced and/or expressed in the context of any protein construct described herein. For instance, the proteins can be produced or expressed in the context of S-Klotho, isoform 1 or 2, 1-981, 29-981, 34-981, 36-981, 131-981, 1-549, 29-549, 34-549, 36-549, 131-549, and so forth, with or without a tag (e.g., Fc tag, TEV-Twin-Strep tag, TEV sequence, etc.). Accordingly, the nucleic acid construct or cDNA from which the protein is expressed can be of corresponding length.

[0542] Embodiments can include producing a heterozygous or homozygous variant construct, transferring (e.g., via transfection) the resulting construct, which encodes the S-Klotho protein, into an appropriate expression system (e.g., CHO cells), and/or transiently expressing the S-Klotho protein. The Klotho protein may be expressed at higher levels than the other Klotho proteins, including wild-type. Embodiments can include purifying (and optionally quality-control testing) the expressed protein for therapeutic administration. Embodiments can include administering a therapeutic or therapeutically-effective amount of the S-Klotho protein to a subject in need thereof (e.g., a patient with or at risk of developing colorectal cancer (CRC) or another tumor). The subject may, for example, harbor or express a Klotho variant with decreased Wnt inhibition activity. Alternatively, the subject may be of wild-type of other mutant or variant type. Administration of the recombinant S-Klotho protein can lead to a beneficial increase in blood S-Klotho levels.

### Therapeutic Treatment of Non-Human Mammals

[0543] In addition to the foregoing, one or more non-human, mammalian Klotho proteins or protein sequences (or portion(s) thereof) can be useful in implementing certain embodiments of the present disclosure. SEQ ID NOS: 121-124 present DNA sequences for encoding various non-human mammalian Klotho proteins. SEQ ID NOS: 111-120 present amino acid sequences for various non-human mammals. These Klotho protein sequences (or portion(s) thereof) can be expressed, purified, formulated into compositions, and/or administered to animals in a manner similar to that described above. Therapeutics administration of recombinant Klotho (fusion) proteins can be effective in treating the non-human mammal version of the medical and other conditions outlined herein. In particular, embodiments of the present disclosure can include veterinary treatment method, proteins, and compositions, as will be understood by those skilled in the art.

### EXAMPLES

### Example 1

[0544] Table 48 illustrates the results from transient expression and purification of the recited Klotho variants in HEK and/or CHO cell lines. In the results provided in Table 48, below, the following abbreviated protocols were followed.

[0545] For Fc fusion proteins, protein expression vectors transfected into HEK293.sus or CHO using standard methods. Briefly, cells were grown for 7 days and harvested. Cell counts are given in notes section. Supernatant pH was adjusted with 1 M Hepes pH 7.4 and sodium azide added. KanCap A resin was used to capture proteins. Resin was washed with PBS. Resin was washed with PBS plus 1 M NaCl. Resin was washed with PBS. Proteins were eluted with 50 mM Citrate pH 3.5, 100 mM NaCl. Proteins were immediately neutralized with 1 M Tris pH 8, 0.5M Arginine. SDS PAGE gel samples were removed at this stage. Proteins were buffer exchanged into PBS. Protein was quantified by OD280, quantity and concentration was determined using calculated extinction coefficient. Reduced and non-reduced SDS-PAGE (Biorad criterion Tris/Glycine/SDS, 4-20%) were used to determine purity and approximate molecular mass. Aggregation status was determined by HPLC, with detection at 280 nm using a Sepax Zenix-C SEC-300, 3 um, 300Å, 4.6*150 mm size exclusion column and PBS running buffer. Proteins were shipped as aliquots after filter sterilization, snap frozen in liquid nitrogen. Loss of protein was observed for some Fc proteins during desalting into PBS, as determined from samples run on SDS-PAGE before and after purification. These proteins are expressed but from the HPLC, problems arose during desalting or assay on the silica HPLC column in PBS. Accordingly, buffer selection was optimized to reduce protein loss.

[0546] For Strep tagged proteins, protein expression vectors transfected into HEK293.sus or CHO using standard methods. Briefly, cells were grown for 7 days and harvested. Supernatant pH was adjusted with 1 M Hepes pH 7.4 and sodium azide added. BioLock biotin sequestration reagent was added. StrepTactin superflow resin was used to capture proteins. Resin was washed with 100 mM Tris pH 8, 150 mM NaCl, 1 mM EDTA. Proteins were eluted with 100 mM Tris pH 8, 150 mM NaCl, 1 mM EDTA plus 2.5 mM Desthiobitin. Protein was quantified by OD280, quantity and concentration was determined using calculated extinction coefficient. Reduced and non-reduced SDS-PAGE (Biorad criterion Tris/Glycine/SDS, 4-20%) were used to determine purity and approximate molecular mass. Aggregation status was determined by HPLC, with detection at 280nm using a Sepax Zenix-C SEC-300, 3 um, 300Å, 4.6*150 mm size exclusion column and PBS running buffer. Proteins were shipped as aliquots after filter sterilization, snap frozen in liquid nitrogen. It should be noted that for the Strep tagged proteins, samples were assayed in elution buffer. This elution buffer is very ‘neutral’ and is not detrimental to proteins. Also, the running buffer for the SEC column was PBS, so the proteins underwent a buffer exchange during assay. Absorbance at times above 7 minutes are small molecules.

TABLE 48

| | OD280 | Conc. | Extinction | Molecular | Titer |
|---|---|---|---|---|---|
| Protein Name | nm | (mg/mL) | Coefficient | Weight (Da) | (mg/L) |
| Native Klotho ECD (34-981)- | 2.01 | 0.95 | 246780 | 116615 | 6.18 |
| nativeSS-strep-HEK | | | | | |
| Native Klotho ECD (34-981)- | 1.73 | 0.79 | 246780 | 113119 | 5.16 |
| nonNativeSS-strep-HEK | | | | | |
| Klotho ECD variant-1(36-981)- | 0.89 | 0.41 | 246780 | 112893 | 2.64 |
| nonNativeSS-strep-HEK | | | | | |
| Native secreted/Isoform 2 (34- | 1.33 | 0.63 | 140510 | 66255 | 4.07 |
| 549)-nativestrep-HEK | | | | | |
| Native secreted/Isoform 2 (34- | 2.84 | 1.27 | 140510 | 62760 | 8.24 |
| 549)-SS-strep-HEK | | | | | |
| Secreted variant (36-549)- | 1.40 | 0.62 | 140510 | 62534 | 4.04 |
| nonNativeSS-strep-HEK | | | | | |
| Klotho ECD variant-2 (131-981)- | 1.12 | 0.52 | 221800 | 103079 | 3.40 |
| nonNativeSS-strep-HEK | | | | | |
| Native Klotho ECD (34-981)- | 0.02 | 0.01 | 270075 | 138668 | 0.27 |
| nativeSS-Fc-HEK | | | | | |
| Native Klotho ECD (34-981)- | 0.01 | 0.00 | 270075 | 135172 | 0.12 |
| nonNativeSS-Fc-HEK | | | | | |
| Klotho ECD variant-1(36-981)- | −0.04 | −0.02 | 270075 | 134946 | −0.48 |
| nonNativeSS-Fc-HEK | | | | | |
| Native secreted/Isoform 2 (34- | 0.03 | 0.02 | 163805 | 88308 | 0.43 |
| 549)-nativeSS-Fc-HEK | | | | | |
| Native secreted/Isoform 2 | 0.05 | 0.03 | 163805 | 84813 | 0.76 |
| (34-549)-nonNativeSS-Fc-HEK | | | | | |
| Secreted variant (36-549)- | −0.01 | −0.00 | 163805 | 84587 | −0.08 |
| nonNativeSS-Fc-HEK | | | | | |
| Klotho ECD variant-2 (131-981)- | −0.01 | −0.01 | 245095 | 125132 | −0.15 |
| nonNativeSS-Fc-HEK | | | | | |
| Native Klotho ECD (34-981)- | 0.42 | 0.20 | 246780 | 116615 | 1.97 |
| nativeSS-strep-CHO | | | | | |
| Native Klotho ECD (34-981)- | 0.28 | 0.13 | 246780 | 113119 | 1.30 |
| nonNativeSS-strep-CHO | | | | | |
| Klotho ECD variant-1(36-981)- | 0.15 | 0.07 | 246780 | 112893 | 0.68 |
| nonNativeSS-strep-CHO | | | | | |
| Native secreted/Isoform 2 | 0.26 | 0.12 | 140510 | 66255 | 1.24 |
| (34-549)-nativeSS-strep-CHO | | | | | |
| Native secreted/Isoform 2 | 0.36 | 0.16 | 140510 | 62760 | 1.61 |
| (34-549)-nonNativeSS-strep-CHO | | | | | |
| Secreted variant (36-549)- | 0.22 | 0.10 | 140510 | 62534 | 0.98 |
| nonNativeSS-strep-CHO | | | | | |
| Klotho ECD variant-2 (131-981)- | 0.19 | 0.09 | 221800 | 103079 | 0.86 |
| nonNativeSS-strep-CHO | | | | | |
| Native secreted/Isoform 2 (34- | 0.12 | 0.06 | 163805 | 88308 | 1.54 |
| 549)-nativeSS-Fc-CHO | | | | | |
| Native secreted/Isoform 2 (34- | 0.16 | 0.08 | 163805 | 84813 | 2.05 |
| 549)-nonNativeSS-Fc-CHO | | | | | |

[0547] In certain embodiments, EDTA and/or other metal chelating agent(s) were removed from (or not included in) one or more (e.g., all) of the purification steps and/or buffers. In some embodiments, EDTA and/or other metal chelating agent(s) may contribute to or cause deactivation of the Klotho protein.

[0548] In a follow up study, transiently-expressed Fc-Klotho proteins were purified using Aquity UPLC BEH200 SEC analytical column: 1.7 um, 4.6×150 mm; Mobile Phase: 100 mM Sodium Phosphate, 200 mM Sodium Chloride, pH 6.8; Flow Rate: 0.35 mL/min; Run Time: 9 minutes; Detection: A280, MALS & RI detector; Ambient sample compartment, 30C column compartment; 100 uL of sample injected (37 ug). FIG. 14 illustrates a chromatograph of Klotho-Fc protein. The majority of Fc Klotho protein appears to overlay with the first peak of MW markers near the void volume. This corresponds to a very high molecular weight seen for the main peak (in mega daltons), which is much higher than native Klotho. By SDS-PAGE, non-reducing, the peak (fractions) contains protein the size of a monomer, suggesting non-covalent association in solution. A minor shoulder is observed on the tail of the main Klotho peak (marked with dashed oval); this is <1% of total Klotho peak area with a MW larger than IgG by elution time on the SEC column relative to the MW markers and ˜700 kDa by light scattering (the LS signal is very low and has tailing of the aggregates, so might be over-estimated). This peak corresponds to a multimer, perhaps a dimer or tetramer.

[0549] Various alternative purification schemes, including different columns, buffers, conditions, etc. were used to address the issue with protein aggregation and multimer formation. However, in at least one embodiment, a multimer (dimeric, tetrameric, etc.) Klotho protein can be purified.

### Example 2

[0550] Stable expression of the (human) Klotho derived proteins represented in SEQ ID NO: 52 (N′-human alpha Klotho 34-981 isoform 1_(G₄S)₂ linker_human IgG1 Fc-C′), SEQ ID NO: 54 (N′ -human alpha Klotho 34-549 isoform 2_(G₄S)₂ linker_human IgG1 Fc-C′), and SEQ ID NO: 66 (N′ -human alpha Klotho 34-981 isoform 1_Twin-Strep cleavage site residues) was performed in CHO cells. Each of the three Klotho protein constructs was expressed with a non-naturally-occurring N-terminal signal sequence, which was then cleaved during the stable expression/purification process to yield the N-terminal (Klotho protein) amino acid. C-terminal to the Klotho protein sequence in SEQ ID NOS: 52 and 54 is a GS linker (GGGGSGGGGS) and an Fc-fusion tag (human IgG1 Fc domain), which are (or appear to be) retained in the expressed protein. C-terminal to the Klotho protein sequence in SEQ ID NOS: 52 is a TEV-Twin-Strep tag (with GS linker) (GGENLYFQ/SSAWSHPQFEK-GGGSGGGSGGS-SAWSHPQFEK), which is cleaved following the glutamine 8 (Q8) of the TEV-Twin-Strep tag (i.e., GGENLYFQ-), to release the Twin-Strep tag portion (SSAWSHPQFEK-GGGSGGGSGGS-SAWSHPQFEK) and retain at least a portion of the TEV (protease recognition or consensus) sequence (GGENLYFQ-C′).

[0551] The coding sequences were codon optimized using DNA2.0 proprietary algorithms. The genes were synthesized and Pd3600 transposon backbone-based expression constructs were assembled.

[0552] A GS knockout CHOK1 derivative host cell line was used to express the human Klotho variants. The cells have been co-transfected, with Leap-In transposon based expression plasmids coding for the three different hKlotho designs and Leap-In transposases. The transfections were performed by electroporation using a Neon apparatus (Thermo). Transfected cells were selected under glutamine free conditions and the resulting stable pools were cryopreserved. Cells from the established stable pools were inoculated into shake flasks and fed batch production studies were conducted using small scale established feeding and cell culture conditions. Clarified harvest samples were collected and submitted for Western blot analysis using anti-Fc antibody—(SEQ ID NOS: 52 and 54) or Strep-Tactin—(SEQ ID NO: 66) HRP conjugate based detection. Example Western blots are shown in FIGS. 15A-16B.

[0553] Stable pool 291645 expressing the FL-ECD (34-981)-Fc Klotho derivative (SEQ ID NO: 52) produces the protein predominantly at the expected size (see FIG. 15A). The predicted size of the full-length extracellular domain-Fc fusion protein monomer is 139 kDa. The predominant anti-Fc positive band is at the predicted ˜140kDa size (arrow) indicating that expression construct 291645 expresses the correct size fusion protein. The protein dimerizes under native and non-reducing conditions (see FIG. 15B). Under non-reducing conditions the full-length extracellular domain-Fc fusion protein may form homodimers. The size of the predominant band detected by anti Fc antibody on a non-reducing Western blot (arrow) is consistent with the formation of the predicted homodimers.

[0554] The FL-ECD (34-981)-TEV-Twin-Strep molecule expressed by stable pool 291647 (SEQ ID NO: 66), also shows the correct size on Western blots and remains a monomer under native and non-reducing conditions (see FIGS. 16A-16B). The expected size isoform-2 -Fc variant represents the secreted human Klotho protein. The predicted molecular mass of the mature full length ECD (34-981)-twin-strep tagged Klotho protein (SEQ ID NO: 66), is ˜109 kDa. Non-reduced Western blot analysis demonstrates the successful expression of the correct size protein from CHO cells coded by expression construct 291647 (see FIG. 16A). Non-reduced denatured Western blot analysis indicates that the full-length extracellular domain of hKlotho does not form covalent homodimers when secreted from CHO cells (see FIG. 16B). Other protein constructs represented in the accompanying Sequence Listing were also prepared. FIG. 17 is a gel of the various indicated recombinant Klotho protein constructs. FIG. 18 is a series of gels for the respective indicated recombinant Klotho protein constructs.

[0555] It should be appreciated that the expression and/or purification of the Klotho variants disclosed in Table 48 and/or shown in FIGS. 15A through 18, in addition to one or more other Klotho variants disclosed herein but not shown in Table 48, can, in some embodiments, result in advantages over the expression and/or purification of native Klotho. For example, there can be a reduction in the number and/or types of alternative products when expressing and/or purifying Klotho variants. Additionally, or alternatively, there can be an increase in expression level of the desired Klotho variant compared to the expression level of native Klotho. Additionally, or alternatively, the desired Klotho variant is expressed and/or purified in a purer form under comparable conditions and methods (e.g., the concentration of the desired Klotho variant is increased with a concomitant decrease in side products expressed and/or purified). Preliminary results indicated that designed recombinant fusion proteins are being expressed and purified in suitable titer ranges and are soluble in acceptable buffers, carriers, and excipients.

[0556] Further cell lines were developed and assessed for density, viability and production. Data from the top 10 clones are illustrated in FIGS. 19-22. Data from the top 4 clones are illustrated in FIGS. 23-26. Based on fed batch ranking, the top two clones appear to be 138 D9 and 145 G8. Based on pseudo-perfusion cumulative productiveity, 138 D9 appears to be the top performer. 140 F6 reached the highest VCD. Copy number stability was also assessed as illustrated in FIG. 27. Total RNA was extracted and RNA isolation was performed using RNeasy Mini Kit (Qiagen, catalog # 74104). Following RNA isolation, amplification of templates was carried out using Omniscript RT Kit (Qiagen, catalog # 205111). All cDNA sequences were as expected.

[0557] Stability of five of the clones was further tested as illustrated in FIGS. 28-32. These clones were grown in growth media with and without glutamine, and shown to have higher growth rates in the presence of 4 mM glutamine, compared to the glutamine-free condition. No growth rate change was observed during >60 population doublings in either sets. Viable cell density and percent viability of clones over a 7 day time course is illustrated in FIG. 30-31. Volumetric productivity of clones in 7 day fed batch cultures of Time 0, 60PD in the presence (+) and in the absence (−) of 4 mM glutamine is illustrated in FIG. 32. The volumetric productivity by the TO and PD60 no glutamine cells are comparable. The PD60+ glutamine volumetric productivities are either comparable or somewhat lower, but never lower than the ˜70% of the TO values.

[0558] Cells were adapted to 100% for EX-CELL, ActiPro, and CD OptiCHO media, and nearly 100% adapted to CD CHO, CD FortiCHO, BalanCD CHO Growth A, and Select CD1000 media.

### Example 3

[0559] Purified Klotho proteins were observed on gel following ELISA, as shown in FIG. 33. Table 49 presents an ELISA plate map key (upper two segments) and heat map-labeled ELISA 450nm data (lower two segments). Table 50 presents the ELISA data for the Klotho proteins from cell culture supernatants and human serum samples. Table 51 presents the average concentration of Klotho in each sample group.

[0560] Table 52 presents an ELISA plate map key for human serum Klotho levels before (upper two segments) and after (lower two segments) recombinant Klotho protein injection. Table 53 presents heat map-labeled ELISA 450nm data for Klotho protein levels in human serum samples before (upper two segments) and after (lower two segments) recombinant Klotho protein injection as measured by ELISA. Human serum samples were diluted 2-fold and cell culture supernatants were diluted 5,000-fold using Klotho ELISA assay sample dilution buffer. Serum B1 and cell culture supernatants were included in both ELISA plates as controls. TMB 30 minutes. Table 54 presents a summary of average concentration of Klotho protein in the samples indicated.

TABLE 49

| | | | | | |
|---|---|---|---|---|---|
| STD, 6 ng/mL | Klotho native, 6 ng/mL | Klotho-FC, 6 ng/mL | Klotho GW, 6 ng/Ml | KLA-645 | KLA-647 |
| | | | | (1:1,000) | (1:1,000) |
| STD, 3 ng/mL | Klotho native, 3 ng/mL | Klotho-FC, 3 ng/mL | Klotho GW, 3 ng/mL | KLA-645 | KLA-647 |
| | | | | (1:10,000) | (1:10,000) |
| STD, 1.5 ng/mL | Klotho native, 1.5 ng/mL | Klotho-FC, 1.5 ng/mL | Klotho GW, 1.5 ng/Ml | KLA-645 | KLA-647 |
| | | | | (1:100,000) | (1:100,000) |
| STD, 0.75 ng/mL | Klotho native, 0.75 ng/mL | Klotho-FC, 0.75 ng/mL | Klotho GW, 0.75 ng/mL | KLA-645 | KLA-647 |
| | | | | (1:1,000,000) | (1:1,000,000) |
| STD, 0.375 ng/mL | Klotho native, 0.375 ng/mL | Klotho-FC, 0.375 ng/mL | Klotho GW, 0.375 ng/mL | Serum 1A | Serum 13A |
| STD, 0.188 ng/mL | Klotho native, 0.18 ng/mL | Klotho-FC, 0.188 ng/mL | Klotho GW, 0.188 ng/mL | Serum 1A (1:2) | Serum 13A (1:2) |
| STD, 0.094 ng/mL | Klotho native, 0.094 ng/mL | Klotho-FC, 0.094 ng/mL | Klotho GW, 0.094 ng/mL | Serum 1A (1:4) | Serum 13A (1:4) |
| STD, 0 ng/mL | Klotho native, 0 ng/mL | Klotho-FC, 0 ng/mL | Klotho GW, 0 ng/mL | Serum 1A (1:8) | Serum 13A (1:8) |

| | | | | | | | | | | | |
|---|---|---|---|---|---|---|---|---|---|---|---|
| 3.138 | 3.102 | 0.073 | 0.075 | 0.085 | 0.075 | 3.773 | 3.853 | 0.97 | 0.96 | 3.521 | 3.583 |
| 1.777 | 1.751 | 0.068 | 0.072 | 0.077 | 0.07 | 3.247 | 3.271 | 0.185 | 0.183 | 0.548 | 0.574 |
| 0.963 | 0.952 | 0.071 | 0.074 | 0.079 | 0.07 | 1.886 | 1.92 | 0.088 | 0.09 | 0.13 | 0.144 |
| 0.54 | 0.532 | 0.073 | 0.07 | 0.064 | 0.071 | 1.095 | 1.128 | 0.084 | 0.089 | 0.097 | 0.093 |
| 0.308 | 0.319 | 0.083 | 0.076 | 0.074 | 0.074 | 0.596 | 0.615 | 0.397 | 0.406 | 0.449 | 0.422 |
| 0.201 | 0.194 | 0.074 | 0.074 | 0.075 | 0.066 | 0.34 | 0.338 | 0.261 | 0.255 | 0.29 | 0.301 |
| 0.143 | 0.133 | 0.071 | 0.068 | 0.086 | 0.084 | 0.206 | 0.207 | 0.167 | 0.171 | 0.184 | 0.196 |
| 0.071 | 0.075 | 0.078 | 0.075 | 0.071 | 0.068 | 0.071 | 0.081 | 0.13 | 0.13 | 0.142 | 0.143 |

TABLE 50

| | | | | | | | | | Klotho |
|---|---|---|---|---|---|---|---|---|---|
| Wells | Values | R | Result | MeanResult | Std. Dev. | CV % | Dilution | Adj. Result | (ng/mL) |
| A7 | 3.773 | R | 7.668 | 7.776 | 0.153 | 2 | 1 | 7.776 | |
| A8 | 3.853 | R | 7.884 | | | | | | |
| B7 | 3.247 | R | 6.31 | 6.339 | 0.042 | 0.7 | 2 | 12.678 | |
| B8 | 3.271 | R | 6.369 | | | | | | |
| C7 | 1.886 | | 3.256 | 3.29 | 0.049 | 1.5 | 4 | 13.161 | 13.58 |
| C8 | 1.92 | | 3.325 | | | | | | |
| D7 | 1.095 | | 1.733 | 1.764 | 0.043 | 2.4 | 8 | 14.109 | |
| D8 | 1.128 | | 1.794 | | | | | | |
| E7 | 0.596 | | 0.853 | 0.87 | 0.023 | 2.6 | 16 | 13.915 | |
| E8 | 0.615 | | 0.886 | | | | | | |
| F7 | 0.34 | | 0.424 | 0.423 | 0.002 | 0.6 | 32 | 13.523 | |
| F8 | 0.338 | | 0.421 | | | | | | |
| G7 | 0.206 | | 0.206 | 0.206 | 0.004 | 0.6 | 64 | 13.206 | |
| G8 | 0.207 | | 0.207 | | | | | | |
| H7 | 0.071 | R | Range? | 0.006 | 0 | 0 | 128 | 0.729 | |
| H8 | 0.081 | | 0.006 | | | | | | |
| A9 | 0.97 | | 1.507 | 1.499 | 0.13 | 0.8 | 1000 | 1498.504 | 1599.46 |
| A10 | 0.96 | | 1.49 | | | | | | |
| B9 | 0.185 | | 0.172 | 0.17 | 0.002 | 1.3 | 10000 | 1700.413 | |
| B10 | 0.183 | | 0.168 | | | | | | |
| C9 | 0.088 | | 0.017 | 0.18 | 0.002 | 12.2 | 100000 | 1830.104 | |
| C10 | 0.09 | | 0.02 | | | | | | |
| D9 | 0.084 | | 0.01 | 0.14 | 0.006 | 38.9 | 1000000 | 14356.72 | |
| D10 | 0.089 | | 0.018 | | | | | | |
| A11 | 3.521 | R | 7.003 | 7.084 | 0.114 | 1.6 | 1000 | 7083.639 | |
| A12 | 3.583 | R | 7.164 | | | | | | |
| B11 | 0.548 | | 0.772 | 0.031 | 0.031 | 3.9 | 10000 | 7938.998 | 8700.99 |
| B12 | 0.574 | | 0.816 | | | | | | |
| C11 | 0.13 | | 0.083 | 0.016 | 0.016 | 16.7 | 100000 | 9462.989 | |
| C12 | 0.144 | | 0.106 | | | | | | |
| D11 | 0.097 | | 0.031 | 0.004 | 0.004 | 16.1 | 1000000 | 27789.87 | |
| D12 | 0.093 | | 0.025 | | | | | | |
| E9 | 0.397 | | 0.519 | 0.526 | 0.011 | 23 | 1 | 0.526 | 0.56 |
| E10 | 0.406 | | 0.533 | | | | | | |
| F9 | 0.261 | | 0.295 | 0.29 | 0.007 | 2.4 | 2 | 0.58 | |
| F10 | 0.255 | | 0.285 | | | | | | |
| G9 | 0.167 | | 0.143 | 0.146 | 0.005 | 3.1 | 4 | 0.584 | |
| G10 | 0.171 | | 0.149 | | | | | | |
| H9 | 0.13 | | 0.083 | 0.083 | 0 | 0 | 8 | 0.668 | |
| H10 | 0.13 | | 0.083 | | | | | | |
| E11 | 0.449 | | 0.605 | 0.583 | 0.032 | 5.5 | 1 | 0.583 | 0.71 |
| E12 | 0.422 | | 0.56 | | | | | | |
| F11 | 0.29 | | 0.342 | 0.351 | 0.013 | 3.6 | 2 | 0.702 | |
| F12 | 0.301 | | 0.36 | | | | | | |
| G11 | 0.184 | | 0.17 | 0.18 | 0.014 | 7.6 | 4 | 0.719 | |
| G12 | 0.196 | | 0.189 | | | | | | |
| H11 | 0.142 | | 0.103 | 0.103 | 0.001 | 1.1 | 8 | 0.827 | |
| H12 | 0.143 | | 0.104 | | | | | | |

TABLE 51

| | [Klotho], |
|---|---|
| Samples | ng/mL |
| Klotho from GenWay | 13.58 |
| Supernatant, KLA-645 | 1599.46 |
| Supernatant, KLA-647 | 8700.99 |
| Human serum, Base, 1A | 0.56 |
| Human serum, Protein, 13A | 0.71 |

TABLE 52

| | 1 | 2 | 3 | 4 | 5 | 6 | 7 | 8 | 9 | 10 | 11 | 12 |
|---|---|---|---|---|---|---|---|---|---|---|---|---|
| A | STD, 6 ng/mL | | 1A | | 2A | | 3A | | 4A | | 5A | |
| B | STD, 3 ng/mL | | 6A | | 7A | | 8A | | 9A | | 10A | |
| C | STD, 1.5 ng/mL | | 11A | | 12A | | 13A | | B1 | | | |
| D | STD, 0.75 ng/mL | | KLA-645 (Day 9) | | KLA-645 (Day 10) | | KLA-647 (Day 8) | | KLA-647 (Day 9) | | | |
| E | STD, 0.375 ng/mL | | | | | | | | | | | |
| F | STD, 0.188 ng/mL | | | | | | | | | | | |
| G | STD, 0.094 ng/mL | | | | | | | | | | | |
| H | STD, 0 ng/mL | | | | | | | | | | | |
| | 1 | 2 | 3 | 4 | 5 | 6 | 7 | 8 | 9 | 10 | 11 | 12 |

| A | STD, 6 ng/mL | 1A | 2A | 3A | 4A | 5A |
|---|---|---|---|---|---|---|
| B | STD, 3 ng/mL | 6A | 7A | 8A | 9A | 10A |
| C | STD, 1.5 ng/mL | 11A | 12A | 13B | 14A | 15A |
| D | STD, 0.75 ng/mL | 16A | 17A | 18A | 19A | 20A |
| E | STD, 0.375 ng/mL | 21A | 22A | 23A | 24A | 25A |
| F | STD, 0.188 ng/mL | 26A | 27A | 28A | 29A | B1 |
| G | STD, 0.094 ng/mL | KLA-645 (Day 9) | KLA-645 (Day 10) | KLA-647 (Day 8) | KLA-647 (Day 9) | |
| H | STD, 0 ng/mL | | | | | |

[0561] Table 55 presents the concentration and monoclonality of the replicate Klotho protein samples.

TABLE 55

| | | Gel | Conc. (mg/L) | Conc. (mg/L) | |
|---|---|---|---|---|---|
| | Clone ID | Lane | Method 1 | Method 2 | Monoclonality |
| 1 | KLO-145-G8 | B8 | 127.2 | 154.0 | Likely |
| 2 | KLO-138-B8 | A7 | 108.9 | 79.4 | yes |
| 3 | KLO-138-D9 | D5 | 106.54 | 133.9 | yes |
| 4 | KLO-139-C6 | A12 | 102.0 | 64.6 | yes |
| 5 | KLO-138-D9 | D4 | 98.33 | 138.1 | yes |
| 6 | KLO-145-E11 | B3 | 94.1 | 62.3 | yes |
| 7 | KLO-140-E8 | A4 | 91.4 | 55.5 | yes |
| 8 | KLO-137-G6 | A1 | 88.7 | 50.9 | yes |
| 9 | KLO-139-G5 | A5 | 83.9 | 53.7 | yes |
| 10 | KLO-137-D8 | A6 | 83.4 | 51.2 | yes |
| 11 | KLO-139-G17 | A9 | 81.7 | 49.1 | yes |
| 12 | KLO-140-D6 | B6 | 76.88 | 63.2 | yes |
| 13 | KLO-138-E2 | A3 | 76.8 | 33.0 | yes |
| 14 | KLO-140-G3 | A11 | 74.4 | 44.9 | yes |
| 15 | KLO-138-E11 | B5 | 73.04 | 53.2 | questionable |
| 16 | KLO-143-G6 | B2 | 70.6 | 40.5 | yes |
| 17 | KLO-140-G4 | A2 | 68.2 | 36.2 | no |
| 18 | KLO-137-D5 | A10 | 66.7 | 38.7 | yes |
| 19 | KLO-137-D6 | A8 | 66.1 | 36.8 | yes |
| 20 | KLO-144-C4 | B4 | 60.5 | 30.3 | very likely |
| 21 | KLO-138-G8 | B7 | 58.11 | 40.1 | no |
| 22 | KLO-139-D11 | C5 | 49.99 | 40.4 | questionable |
| 23 | KLO-139-F11 | C3 | 49.37 | 41.4 | yes |
| 24 | KLO-138-G2 | C4 | 47.5 | 37.6 | Unknown |
| 25 | KLO-645-146-B2 | C8 | 47.39 | 34.4 | Unknown |
| 26 | KLO-138-G4 | C1 | 35.59 | 24.3 | Unknown |
| 27 | KLO-138-B10 | B10 | 35.27 | 38.8 | Unknown |
| 28 | KLO-144-G6 | B1 | 34.8 | 20.4 | Unknown |
| 29 | KLO-139-B11 | B12 | 34.66 | 32.7 | Unknown |
| 30 | KLO-140-F6 | B11 | 34.53 | 34.6 | Unknown |
| 31 | KLO-645-143-D7 | C7 | 30.28 | 15.7 | Unknown |
| 32 | KLO-645-143-F9 | D1 | 28.04 | 22.1 | Unknown |
| 33 | KLO-645-168-A8 | C10 | 26.92 | 16.3 | Unknown |
| 34 | KLO-645-142-G2 | B9 | 22.71 | 18.8 | Unknown |
| 35 | KLO-645-169-D7 | D3 | 21.08 | 17.1 | Unknown |
| 36 | KLO-645-168-G12 | C12 | 18.46 | 11.7 | Unknown |
| 37 | KLO-645-167-B10 | C9 | 8.49 | 0.0 | Unknown |
| 38 | KLO-645-146-C10 | D2 | 7.71 | 17.4 | Unknown |
| 39 | KLO-645-168-F10 | C11 | 0 | 43.0 | Unknown |

[0562] An illustrative method for estimation of concentration involved quantitation (quantification) by PAGE against a BSA standard. An illustrative method for estimation of concentration involved measurement against purified Klotho standard.

[0563] One interpretation of the data could be that native-like, recombinant (TwinStrep-TEV tag-removed) Klotho protein expresses better, purifies cleaner, and/or retains more activity than does the recombinant Fc-tagged Klotho protein. This was surprising and unexpected. An alternative interpretation is that neither protein, or the Fc-fusion protein more so than the native-like protein, showed levels of klotho protein reaction to the ELISA antibody. Accordingly, we may have identified that expression, purification, storage, and/or administration of native-like recombinant Klotho protein and Fc-fusion Klotho protein was not as simple as expected and that standard techniques did not work well. Proceeding based on the later interpretation, procedures were modified to obtain more active protein, while continuing to process the data for further interpretation.

[0564] Three commercially-available ELISA detection kits for Klotho protein were also tested for suitability in accordance with certain embodiments of the present disclosure. See Tables 57 and 58, below. The IBL Kits shows low background, liner dilution of serum samples, acceptable spike recovery after 1:4 dilution. The Cloud-clone Kits shows high background, no liner dilution of serum samples, no acceptable spike recovery. The EIAab Kits shows low background, very low Klotho concentration in serum sample, no liner dilution of serum samples, no acceptable spike recovery.

[0565] Total 8 human serum samples were diluted with each kit's dilution buffer at 1:2, 1:4, 1:8. 4 of these 8 serum samples were spiked with top concentration of Standard from each kit at 1:20 dilution. The protocol from each kit was followed per instructions provided.

[0566] FIGS. 34A-34C illustrate Klotho protein concentration measured and spike recovery observed in the respective samples.

TABLE 57

| Vendor | Assay Range | |
|---|---|---|
| IBL | 93.8-6000 | pg/mL |
| Cloud-Clone | 15.6-1000 | pg/mL |
| EIAab | 7.8-500 | pg · mL |

TABLE 58

| Vendor | Spiking Concentration (pg/mL) |
|---|---|
| IBL | 300 |
| Cloud-Clone | 500 |
| EIAab | 25 |

### Example 4

[0567] Preliminary global glycan analysis was also performed as illustrated in FIGS. 35A-35B. Experimental conditions and results for the glycan analysis are presented in Table 59.

TABLE 59

| | |
|---|---|
| Experimental | N-Glycans were released and labeled using the Gly-X ™ N-Glycan rapid release and labeling with |
| conditions | InstantPC ™ Kit. |
| | LC analysis of 1 uL of sample was performed on a Advance Glycan Map 2.1 × 100 mm column. |
| | To gain additional insight into the core glycan structures, the sialic acid content of the sample was |
| | released using SialidaseA |
| | Each peak was assigned a GU unit that was referenced to a in-house database generated from Glycan |
| | Standards. |
| | Area under the peak was calculated for peaks with retention times from 4.5-25 mins and a minimum |
| | peak height of 0.2 and area of 10 or greater. |
| | Percentage area of individual peaks was also calculated. |
| Results | Only the glycans GOF, M5, G1, G1F, G2F, G2 and M7 were assigned with confidence. |
| | Both samples were treated with Sialidase A to try and understand all of the core structures in the |
| | sample. This approached provided no further insight into the unknown peaks. |
| | The sample appears to contain several glycans that are not represented by the glycan standards that |
| | are commercially available. Further characterization either by exoglycosidase treatment or by LC/MS is |
| | recommended. |

[0568] Tables 60 and 61, below present the data illustrated in FIGS. 35A-35B, respectively.

TABLE 60

| Protein ID | Fc Lot180314A | Fc Lot180314A + SA |
|---|---|---|
| Glycan Assignment | Area % | Area % |
| GOF | 5.18 | 5.38 |
| M5 | 4.46 | 4.18 |
| G1F | 6.46 | 5.30 |
| G2 | 4.54 | 9.31 |
| G2F | 13.36 | 36.23 |
| * G2S1 α 2-3 | 4.32 | — |
| * G2FS1 α 2-3 | 18.57 | 5.84 |
| * G2S2 | 4.03 | |
| G2FS2 α 2-3 | 17.66 | — |
| Unknown | 20.43 | 33.79 |

TABLE 61

Protein ID

| | Fc Lot180622A | Fc Lot180622A + SA |
|---|---|---|
| Glycan Assignment | Area % | Area % |
| GOF | 2.68 | 1.91 |
| M5 | 1.62 | 1.45 |
| G1 | 2.98 | 2.68 |
| G1F | 2.11 | 2.33 |
| G2 | 3.87 | 7.33 |
| * G2S1 α 2-3 | 4.06 | 3.947 |
| * G1FS1 α 2-3 | 8.50 | 8.85 |
| Man7 | 17.96 | 16.97 |
| Unknown | 5.22 | 52.86 |

[0569] An additional pool of 9 clones (see Table 62, below) was assessed for suitability.

TABLE 62

| # | Plasmid | Construct |
|---|---|---|
| WA | Puro_BT+_SLX-491X_wtSP_Seq1_Sc | wtSP_Klotho ECD(1-981)-Fc |
| WN | Puro_BT+_SLX-491X_wtSP_Seq2_Sc | wtSP_Klotho ECD(1-981) |
| WD | Puro_BT+_SLX-491X_wtSP_Seq4_Sc | wtSP_Klotho ECD(1-981) - Native V45F |
| WE | Puro_BT+_SLX-491X_wtSP_Seq5_Sc | wtSP-Secreted/Isoform2 (1-549)-Fc |
| XB | Puro_BT+_SLX-491X_LubSP_Seq2_Sc | LubSP_Klotho ECD (1-981) |
| XC | Puro_BT+_SLX-491X_LubSP_Seq3_Sc | wtSP_Klotho ECD (1-981) -Fc V45F |
| XD | Puro_BT+_SLX-491X_LubSP_Seq4_Sc | LubSP_Klotho ECD (1-981) - Native V45F |
| XE | Puro_BT+_SLX-491X_LubSP_Seq5_Sc | LupSP_secreted/Isoform2 (1-549)-Fc |
| XH | Puro_BT+_SLX-491X_LubSP_Seq6_Sc | LubSP_secreted variant (1-549) |

[0570] Growth, viability, and titer of each cell line is presented Table 63, below.

TABLE 63

| | day 3 | | | | day 7 | | | day 9 | | |
|---|---|---|---|---|---|---|---|---|---|---|
| | cell conc | viability | doubling | Titer | cell conc | viability | Titer | cell conc | viability | Titer |
| # | [c/mL] | [%] | time [h] | [ug/mL] | [c/mL] | [%] | [ug/mL] | [c/mL] | [%] | [ug/mL] |
| WA | 4.82E+06 | 99.3 | 18.0 | 0 | 2.30E+07 | 97.1 | 2 | 1.22E+07 | 84.4 | 0 |
| WB | 6.57E+06 | 99.3 | 16.2 | 0 | 2.18E+07 | 95.9 | 1 | 2.63E+07 | 85.2 | 0 |
| WD | 4.89E+06 | 99.3 | 17.9 | 1 | 1.58E+07 | 95.2 | 15 | 1.29E+07 | 90.7 | 18 |
| WE | 6.63E+06 | 99.8 | 16.1 | 20 | 1.68E+07 | 95.8 | 70 | 1.99E+07 | 87.1 | 61 |
| XB | 6.09E+06 | 98.9 | 16.6 | 1 | 2.10E+07 | 96.3 | 5 | 2.68E+07 | 84.8 | 2 |
| XC | 4.95E+06 | 99.0 | 17.8 | 1 | 1.85E+07 | 97.6 | 23 | 9.56E+06 | 91.9 | 22 |
| XD | 5.48E+06 | 98.8 | 17.2 | 0 | 2.58E+07 | 98.6 | 4 | 1.94E+07 | 95.3 | 3 |
| XE | 8.29E+06 | 99.1 | 15.0 | 13 | 2.35E+07 | 94.6 | 49 | 1.37E+07 | 89.2 | 32 |
| XH | 8.46E+06 | 98.4 | 14.9 | 2 | 2.53E+07 | 96.7 | 14 | 1.74E+07 | 90.7 | 5 |

[0571] FIGS. 36A-36C illustrate growth, viability, and titer curves, respectively, for each cell line.

[0572] An additional pool of 3 clones (see Table 64, below) was assessed for suitability.

TABLE 64

| # | Plasmid | Construct |
|---|---|---|
| WC2 | Puro_BT+_SLX-491X_wtSP_Seq3_Sc | wtSP_Klotho |
| | | ECD(1-981)- |
| | | Fc V45F |
| WH2 | Puro_BT+_SLX-491X_wtSP_Seq6_Sc | stSP_secreted |
| | | variant (1-549) |
| XA2 | Puro_BT+_SLX-491X_LubSP_Seq1_Sc | LubSP_Klotho |
| | | ECD(1-981)-Fc |

[0573] Growth, viability, and production of each cell line is presented Table 65, below.

TABLE 65

| | day 3 | | | | day 7 | | | day 9 | | |
|---|---|---|---|---|---|---|---|---|---|---|
| | cell conc | viability | doubling | Titer | cell conc | viability | Titer | cell conc | viability | Titer |
| # | [c/mL] | [%] | time [h] | [ug/mL] | [c/mL] | [%] | [ug/mL] | [c/mL] | [%] | [ug/mL] |
| WC2 | 4.85E+06 | 98.5 | 19.1 | 0 | 2.07E+07 | 97.2 | 4 | 1.80E+07 | 84.2 | 3 |
| WH2 | 5.58E+06 | 99.5 | 18.1 | 8 | 1.92E+07 | 95.9 | 23 | 1.59E+07 | 87.2 | 22 |
| XA2 | 6.61E+06 | 99.2 | 17.1 | 0 | 1.92E+07 | 96.4 | 3 | 1.76E+07 | 88.4 | 5 |

[0574] FIGS. 37A-37C illustrate growth, viability, and titer curves, respectively, for each cell line.

[0575] One of the promising clones (see Table 66, below) was re-assessed for growth, viability, and production.

TABLE 66

| | day 3 | | | | day 7 | | | day 10 | | |
|---|---|---|---|---|---|---|---|---|---|---|
| | cell conc | viability | doubling | Titer | cell conc | viability | Titer | cell conc | viability | Titer |
| # | [c/mL] | [%] | time [h] | [ug/mL] | [c/mL] | [%] | [ug/mL] | [c/mL] | [%] | [ug/mL] |
| XC | 4.65E+06 | 97.2 | 19.3 | 3 | 3.33E+07 | 95.7 | 90 | 2.47E+07 | 57.3 | 109 |

[0576] FIGS. 38A-38C illustrate growth, viability, and titer curves, respectively, for the cell line.

### Example 5

[0577] Western blot analysis was performed on expressed protein pools as illustrated in FIGS. 39A-39B. FIG. 39A illustrates Klotho ECD (34-981) 6x His Protein, and FIG. 39B illustrates the indicated Klotho protein. Unexpectedly, Klotho proteins appear to aggregate into higher molecular weight multimers.

[0578] A 5 L bioreactor expression run was carried out, followed by adapter purification protocols. In a first purification step, Protein A Sepharose 4 Fast Flow (0.75 ml) (0.5 cm×3 cm) column was equilibrated in 10 mM Tris-HCl, pH 8.0. Protein sample (100 ml of Cell Supernatant adjusted to pH 8.0, with 1.5 M Tris-HCl, pH 8.0 (˜1 ml)) was loaded at a flow rate of 0.75 ml/min, washed with 10 mM Tris/Arginine-HCl, pH 8.0 buffer, and eluted with 4 M MgCl₂, pH 3 (i.e., low pH, high salt) at 0.50-0.25 ml/min to produce a concentrated sample. See FIG. 40A. The column was re-equilibrated with 10 mM Tris-HCl, pH 8.0 (to prevent salt precipitate), and sanitized with 0.1 M NaOH: 0.5-0.3 ml/ml to avoid over pressurization. Minimal Klotho protein was eluted during re-equilibration and sanitation.

[0579] Peak #1 and Peak #2 from the Protein A elution were analyzed separately, buffer exchanged, and fractionated using Superdex 200 (1 cm×30 cm) size exclusion chromatography column with 100 mM Tris-HCl/5 mM L-Methionine/0.6% Sodium Thioglycolate, pH 8.0 mobile phase at 0.5 mL/min flow rate. See FIG. 40B. Tris was used to buffer the mobile phase instead of a phosphate-containing buffer to prevent the precipitation of magnesium salts. Reducing agent (L-methionine) was used to prevent the oxidation of Klotho-Fc. Sodium Thioglycolate was used to prevent the scrambling of free sulfhydryl cysteine groups of Klotho-Fc. Buffer components are GRAS listed by the FDA.

[0580] Superdex 200 fractions from single isolated Peak #1 and Peak #2 each show different MW species of klotho-Fc protein. See FIG. 41A and 41B. In summary, analysis of harvested proteins (in media) by SDS-PAGE, suggests that Klotho-Fc exists in various states of aggregation. The purification produced two populations of multimeric Klotho-Fc corresponding to a dimer (≤300 kDa) and a tetramer (≤600 kDa).The binding/elution protocol from Protein A shows far superior product elution profile and produces minimal protein after sanitation. As the formulation has thioglycolate as a reducing agent, the product separates as monomer after heating, and monomer and dimer without heating in gel electrophoresis. These new purification procedures resulted in non-aggregated Fc-klotho protein.

### Example 6

[0581] A bioassay was developed to test the activity of both native and Fc-Klotho proteins, and particularly to test the binding affinity of Klotho proteins to FGF 23 using BLITZ by ForteBio. Initially, the binding affinity of Recombinant Mouse Klotho to Mouse FGF-23 using Surface Plasmon Resonance (SPR) binding methods was assessed. SPR is an optical technique utilized for detecting molecular interactions between an analyte, a mobile molecule, and a ligand, an immobilized molecule bound to the sensor, which upon interaction change the refractive index of the sensor. In this study, the Inventors compared the affinity of six concentrations of Recombinant Mouse Klotho (2-fold serial dilutions from 400 ug/mL to 12.5 ug/mL) antibody to Mouse FGF-23. Using anti-HIS (HIS2) sensors, Mouse FGF-23 is bound to the sensors and then subsequently these sensors are used to produce binding curves for six different concentrations of the Mouse Klotho. From the six association and disassociation curves produced for the antibody, the disassociation constant (K_{d}) value of the antibody is determined. Assays were performed and data verified (data not shown).

[0582] For human recombinant Klotho protein, HIS-Tag biosensor tips were hydrated in PBS for 10 minutes at RT. HIS-Tag labeled FGF23 (ProSpec, Cat#CYT-374) at 300ug/ml in PBS was coupled to biosensor for 2 minutes. Base line was established for 30 seconds on BLITZ instrument. Then, the binding of native and Fc-sKlotho proteins at five two-fold serial dilutions (from 400 ug/ml to 12.5 ug/ml) to immobilized FGF23 was tested for 2 minutes in PBD, and subsequently dissociated for 2 minutes in PBS. The Kₒₙ (association), K_{off} (dissociation), and KD (Koff/Kon) was analyzed using global analysis. See FIG. 42.

[0583] Further assays were performed to test the bioactivity of Klotho proteins using cell based functional assay, and particularly to test the bioactivity of both native and Fc-Klotho proteins by measuring their effect on stimulating NIH/3T3 cell proliferation. Based on biology of Klotho, the rationale of this assay development is to test the effect of Klotho on stimulating the proliferation of NIH-3T3 cells that expressed FGFR.

[0584] Growing phase cells were seeded in culture media (10% FBS-DMEM) at a density of 5000 cells/well/96-well plate, and cultured overnight, followed by a media change to 0.5% FBS and overnight culture. Cells were treated with 10 doses of respective Klotho protein starting at 30 ug/ml, 2-fold serial dilution, each dose in triplicate, and incubated for 48 hours. Cell proliferation was measured using Cell Titer-Glu assay kit, and data was analyzed using 4 parameter-fit curve with GraphPad Prism. The data indicate that purified Klotho proteins, both Native-His and Fc-Klotho, stimulated cell proliferation in a dose-dependent manner. See FIGS. 43A-43E.

### Example 7

[0585] A study to determine the Acute Tolerated Dose (ATD) of Alpha Human Native Klotho and Alpha Human Fc-Fusion Klotho proteins following intravenous administration in male Sprague-Dawley rats was conducted. In the acute tolerated dose study, the safety of the test articles Alpha Human Native Klotho and Alpha Human Fc-Fusion Klotho proteins was assessed in male Sprague-Dawley rats. Prior to dose administration, 21 animals were subcutaneously implanted with transponders. On Study Day -1, animals were randomized into seven groups of three, based on body weights. Alpha Human Native Klotho protein was tested at three dose concentrations of 10 μg/kg, 30 μg/kg, and 100 μg/kg (based on individual body weight) administered intravenously at a dose volume of 1 ml/kg (based on individual body weight) in vehicle (PBS, pH 7.2) on Study Day 0.

[0586] Alpha Human Fc-Fusion Klotho protein was also tested at three dose concentrations of 3 μg/kg, 10 μg/kg and 30 μg/kg (based on individual body weight) administered intravenously at a dose volume of 1 ml/kg (based on individual body weight) in vehicle (PBS, pH 7.2) on Study Day 0. Dosing began with a vehicle-only (PBS, pH 7.2) Group, 10 μg/kg Alpha Human Native Klotho protein Group, and 3 μg/kg Alpha Human Fc-Fusion Klotho protein Group on Study Day 0 and were staggered by at least 24 hours between each test article dose level group. All dosing was given once on the respective start date. Animals were observed for any adverse effects for maximum of 14 days following treatment.

[0587] In-life measurements included twice-daily checks for morbidity and mortality, and clinical observations were noted daily. Body weight measurements were recorded daily. Following completion of the observation phase, all animals were euthanized via cardiac exsanguination. Terminal measurements included blood hematology, serum biochemistry and coagulation. Gross pathology changes were recorded for all animals at necropsy and weights of ten organs (adrenals, brain, epididymides, heart, kidneys, liver, spleen, testes, thyroid/parathyroid and thymus) were taken.

[0588] Table 67 presents a summary of study animals.

TABLE 67

| | | Total | Number of | |
|---|---|---|---|---|
| | Age | Number | Animals | Number of |
| Species/Strain/Sex | Range | of Animals | per Group | Groups |
| Rat/Sprague | 8 weeks | 21 | 3 | 7 |
| Dawley/M | | | | |

[0589] Table 68 presents a summary of study design.

TABLE 68

| Group | Test Article | Dose Level μg/kg |
|---|---|---|
| 1 | PBS, pH 7.2 | — |
| 2 | Alpha Human Native Klotho | 10 |
| 3 | Alpha Human Native Klotho | 30 |
| 4 | Alpha Human Native Klotho | 100 |
| 5 | Alpha Human Fc- Fusion Klotho | 3 |
| 6 | Alpha Human Fc- Fusion Klotho | 10 |
| 7 | Alpha Human Fc- Fusion Klotho | 30 |

[0590] For Group Assignment: Matched Pair Distribution, an optimized distribution method using an algorithm that matches the individual measurement values with the mean of all selected animals was performed. The method begins by taking matching pairs that average close to the mean of all selected animals and then distributes them into groups that will then match the average (or as close as possible) of the mean of all selected animals. Animals are distributed so that the average of the measurement for each group will be as close to the mean of all selected animals as possible.

[0591] For Statistical Analyses, descriptive statistics were generated from Study data. Data was assessed to determine whether parametric or non- parametric analysis was appropriate. For parametric data, analysis of variance (ANOVA) followed by post-hoc tests was performed to determine significant differences between treatments, time points, and/or groups. For non-parametric data, appropriate statistical analyses were performed (e.g., Kaplan-Meier Survival, Kruskal-Wallis One-way ANOVA, Mann-Whitney or Wilcoxon Rank Sum, etc.).

[0592] Table 69 summarizes sample collection procedure.

TABLE 69

| | | Sample Info/ |
|---|---|---|
| Task | Method & Collection | Special Instructions |
| Blood for clinical | collected into non-heparinized | stored at −80° C. |
| biochemistry | tubes for serum preparation | and shipped on |
| | | dry ice |
| Blood for coagula- | collected into sodium | stored at −80° C. |
| tion analyses | citrate tubes | and shipped on |
| | | dry ice |
| Whole blood for | collected into K₂EDTA | stored at 2-8° C. |
| CBC count | tubes | and shipped |
| hematology analysis | | |

[0593] Table 70 summarizes sample collection tasks.

TABLE 70

| Task | Frequency |
|---|---|
| Body weight | Daily |
| Adrenals, brain, epididymides, heart, kidneys, liver, | At termination |
| spleen, testes, thyroid/parathyroid and thymus to be | |
| excised and weighted | |
| Clinical Observation | Daily |
| Morbidity Check | 2x daily |
| Mortality Observation | 2x daily |

[0594] Any animal whose body weight dropped below 85% of initial body weight, or displays severe, prolonged adverse clinical signs was to be euthanized. Animals were to be euthanized via cardiac bleed for collection of plasma, serum and whole blood as indicated above.

[0595] Preliminary results indicated that the rats tolerate relatively high doses of recombinant Klotho proteins administered thereto.

### Example 8

[0596] A study to determine Pharmacokinetics of Alpha Human Native Klotho and Alpha Human Fc-Fusion Klotho Proteins Following IV Dosing in Male Sprague Dawley Rats was conducted. Prior to Study Day 0, animals were subcutaneously implanted with transponders. On Study Day -1 body weights were acquired and animals were randomized based on body weight. On Study Day 0, animals in Groups 5, 6, and 7 (10 animals per group) received a single dose of Alpha Human Fc-Fusion Klotho protein intravenously via the tail vein (see detailed dosing schedule, below) at 3, 10, and 30 μg/kg in 1 ml/kg vehicle (PBS, pH 7.2), respectively. On Study Day 1, animals in Groups 2, 3 and 4 (10 animals per group) received a single dose of Alpha Human Native Klotho protein intravenously via the tail vein (see detailed dosing schedule, below) at 10, 30 and 100 μg/kg protein in 1 ml/kg vehicle (PBS, pH 7.2), respectively. Animals in the vehicle Group 1 (3 animals) was also dosed on Study Day 1 at 1 ml/kg vehicle (PBS, pH 7.2) without protein. The volume of dosing solution administered to each animal was calculated and adjusted based on individual body weight measured acquired on Study Day-1.

[0597] Three blood samples were obtained from each group (2-7) for all time points, equating to three blood samples per rat (see detailed blood collection schedule, below). Time-point blood samples were obtained pre-dose, 3 min, 10 min, 20 min, 30 min, 1 hr, 2 hr, 4 hr, 8 hr and 24 hr post-dose (Groups 2, 3 and 4), as presented in Table 71, below.

TABLE 71

| | Groups 2, 3 and 4 | | | | | | | | | |
|---|---|---|---|---|---|---|---|---|---|---|
| Rat ID | 0 min | 3 min | 10 min | 20 min | 30 min | 1 hr | 2 hr | 4 hr | 8 hr | 24 hr |
| 1 | X | | | | X | | | X | | |
| 2 | | X | | | | X | | | X | |
| 3 | | | X | | | | X | | | X |
| 4 | X | | | X | | | | X | | |
| 5 | | X | | | X | | | | X | |
| 6 | | | X | | | X | | | | X |
| 7 | X | | | X | | | X | | | |
| 8 | | X | | | X | | | X | | |
| 9 | | | X | | | X | | | X | |
| 10 | | | | X | | | X | | | X |

[0598] Time-point blood samples were obtained pre-dose, 3 min, 1 hr, 4 hr, 8 hr, 24 hr, 48 hr, 72 hr, 96 hr and 7 days post-dose (Groups 5, 6, and 7), as presented in Table 72, below. An additional blood collection at 14 days post dosing was obtained in Groups 5, 6, and 7.

TABLE 72

| | Groups 5, 6 and 7 | | | | | | | | | | |
|---|---|---|---|---|---|---|---|---|---|---|---|
| | | | | | | | | | | | 14 day (to be |
| Rat ID | 0 min | 3 min | 1 hr | 4 hr | 8 hr | 24 hr | 48 hr | 72 hr | 96 hr | 7 day | determined) |
| 1 | X | | | | X | | | X | | | |
| 2 | | X | | | | X | | | X | | |
| 3 | | | X | | | | X | | | X | X |
| 4 | X | | | X | | | | X | | | |
| 5 | | X | | | X | | | | X | | |
| 6 | | | X | | | X | | | | X | X |
| 7 | X | | | X | | | X | | | | |
| 8 | | X | | | X | | | X | | | |
| 9 | | | X | | | X | | | X | | |
| 10 | | | | X | | | X | | | X | X |

[0599] Vehicle Group 1 animals were bled terminally once, 1 hr post dose administration, as presented in Table 73, below.

TABLE 73

| | Group 1 |
|---|---|
| Rat ID | 1 hr |
| 1 | X |
| 2 | X |
| 3 | X |

[0600] Resulting serum samples were analyzed via Alpha Klotho Human Soluble ELISA kit.

[0601] Table 74 presents a summary of study animals.

TABLE 74

| | | Total | Number of | |
|---|---|---|---|---|
| | Age | Number | Animals | Number of |
| Species/Strain/Sex | Range | of Animals | per Group | Groups |
| Rat/Sprague | 8-11 weeks | 63 | 3-10 | 7 |
| Dawley/M | | | | |

[0602] Table 75 presents a summary of study design.

TABLE 75

| Group | Test Article | Dose Level μg/kg |
|---|---|---|
| 1 | PBS, pH 7.2 | — |
| 2 | Alpha Human Native Klotho | 10 |
| 3 | Alpha Human Native Klotho | 30 |
| 4 | Alpha Human Native Klotho | 100 |
| 5 | Alpha Human Fc- Fusion Klotho | 3 |
| 6 | Alpha Human Fc- Fusion Klotho | 10 |
| 7 | Alpha Human Fc- Fusion Klotho | 30 |

[0603] For Group Assignment: Stratified Sampling, a non-optimized randomization method that uses “binning” of the animals with measurement values of similar size was used. By this method, the pool of animals is stratified by sorting them by the measurement value of interest in ascending order. Animals are then organized into “bins” or strata according to the size of the measurement value. The number of strata is determined by the number of animals that are to be assigned per group. For example, if there are three animals per group, then three bins would be created: small, medium and large. One animal from each size bin is assigned randomly to each group. Stratified sampling ensures that each group receives one animal randomly from each size bin and the means of each group will remain similar to the other groups. This method balances differences between group means and standard deviations and controls for pool order bias.

[0604] For Statistical Analyses, Descriptive statistics were generated from Study data. Data were assessed to determine whether parametric or non-parametric analysis was appropriate. For parametric data, analysis of variance (ANOVA) followed by post-hoc tests was performed to determine significant differences between treatments, time points, and/or groups. For non-parametric data, appropriate statistical analyses were performed (e.g., Kaplan-Meier Survival, Kruskal-Wallis One-way ANOVA, Mann-Whitney or Wilcoxon Rank Sum, etc.).

[0605] Table 76 summarizes sample collection procedure.

TABLE 76

| | | Sample Info/ |
|---|---|---|
| Task | Method & Collection | Special Instructions |
| Serum preparation | Blood collected via saphenous | Samples processed |
| for PK sampling | vein or cardiac puncture into | to serum and stored |
| | non-heparinized tubes for | at −80 C. prior to |
| | serum | ELISA analysis |

[0606] Table 77 summarizes sample collection tasks.

TABLE 77

| Task | Frequency |
|---|---|
| Body weight | On Study Day −1 and twice weekly thereafter |
| Clinical Observation | 2x weekly |
| Mortality Observation | As required |

[0607] Any animal whose body weight dropped below 85% of initial body weight or displays severe, prolonged adverse clinical signs was euthanized (data not shown). Animals were euthanized via cardiac bleed for collection of plasma, serum and whole blood as indicated above.

### Example 9

[0608] A study to determine Dose-Dependent Effects of Alpha Human Fc-Klotho and Alpha Human Native Klotho on I/R Induced-AM and Renal Biomarkers (by measuring renal I/R-induced increases in plasma renal injury biomarkers) in Wistar Rats was performed. Specifically, the objective of this study was to evaluate the dose-dependent effects of alpha human Fc-Klotho and alpha human native Klotho on renal I/R-induced increases in plasma renal injury biomarkers in rats. The study was designed to provide data from or related to bilateral renal ischemia-reperfusion (I/R) injury (30′ ischemia duration) surgery (n=63) verses sham surgery (n=4), Compound dosing (one i.v. injection/rat), serial urine collections via metabolic cage housing (3 collections/rat; D1, D2 & D7), clinical chemistry analysis of serial urine specimens for creatinine and protein (D1, D2 & D7), serial blood collections (3 collections/rat; D1, D2 & D7), clinical chemistry analysis of serial plasma specimens for creatinine and BUN (D1, D2 & D7), daily body weights and health observations post-surgery through endpoint, and endpoint tissue collection and processing, with data presented in tabular and graphical format.

[0609] In addition, analysis of serial urine specimens for Kim-1 via species specific ELISA (D1, D2 & D7), analysis of serial urine specimens for NGAL via species specific ELISA (D1, D2 & D7), left and/or right kidney mRNA expression analysis (1-2 kidney/animal: n=67 samples; 10 analytes, includes 3 normalization genes; performed using the Affymetrix Quantigene Plex 2.0 platform); MCP-1, TGF-β, α-SMA, Co11A 1, Col3A1, Fn-1, CTGF), and left and/or right renal cortical immunohistochemistry and quantitation of macrophage infiltration via specific staining and quantitation of ED-1+ macrophage staining were also optionally performed.

[0610] Table 78 presents that study parameters.

TABLE 78

| | |
|---|---|
| Compounds: | Alpha Human Fc- Klotho: 10 or 30 μg/kg |
| | Alpha human Native Klotho: 10 or 30 μg/kg |
| Route/ | Alpha Human Fc-Klotho: i.v./dose once at either t − 0.5 |
| Frequency: | hour or t + 1 hour relative to time of ischemia inception |
| | Native Klotho: i.v./dose once at either t − 0.5 hour or t + |
| | 1 hour relative to time of ischemia inception |
| Vehicle/Dose | Alpha Human Fc-Klotho: PBS/1 ml/kg i.v. |
| Volume: | Native Klotho: PBS/1 ml/kg i.v. |
| Compound | Alpha Human Fc-Klotho: 0.221 mg |
| Requirement: | Native Klotho: 0.221 mg |

[0611] Table 79 presents a summary of study design.

TABLE 79

| | | Compound & | | |
|---|---|---|---|---|
| | | Administration | Dose | |
| | N/group | Interval (0 hr = | Volume | |
| | (Animal | time of ischemia | & | |
| Group | #s) | inception) | Route | Challenge |
| 1 | N = 4 | Vehicle | 1 ml/kg | Sham operated |
| | (4528-4531) | +1 Hr. | i.v. | 7 Days Post-Sx |
| 2 | N = 9 | Vehicle | 1 ml/kg | 30′ Ischemia |
| | (4532-4540) | +1 Hr. | i.v. | 7 Days Reperfusion |
| 3 | N = 9 | 10 μg/kg Fc- | 1 ml/kg | 30′ Ischemia |
| | (4541-4549) | Klotho +1 Hr. | i.v. | 7 Days Reperfusion |
| 4 | N = 9 | 30 μg/kg Fc- | 1 ml/kg | 30′ Ischemia |
| | (4550-4558) | Klotho +1 Hr. | i.v. | 7 Days Reperfusion |
| 5 | N = 9 | 10 μg/kg Native | 1 ml/kg | 30′ Ischemia |
| | (4559-4567) | Klotho +1 Hr. | i.v. | 7 Days Reperfusion |
| 6 | N = 9 | 30 μg/kg Native | 1 ml/kg | 30′ Ischemia |
| | (4568-4576) | Klotho +1 Hr. | i.v. | 7 Days Reperfusion |
| 7 | N = 9 | 30 μg/kg Fc- | 1 ml/kg | 30′ Ischemia |
| | (4577-4585) | Klotho −0.5 Hr. | i.v. | 7 Days Reperfusion |
| 8 | N = 9 | 30 μg/kg Native | 1 ml/kg | 30′ Ischemia |
| | (4586-4594) | Klotho −0.5 Hr. | i.v. | 7 Days Reperfusion |

[0612] Sixty-seven (67) male Wistar rats weighing approximately 151-175 g were acquired and fed a standard chow diet (Harlan 8640), group housed under standard conditions, and allowed to acclimate for at least 7 days before enrolling in study. Prior to study inception, the study rats were placed into weight-matched treatment groups. Animals were enrolled to study using a balanced design, such that approximately equal numbers of animals were enrolled per group per surgical day, and the heaviest animals enrolled first to minimize differences in animal age. When not in metabolic cage housing, rats were group housed under standard conditions in static caging.

[0613] At t-0.5 hours, study rats were anesthetized with isoflurane anesthesia on a nosecone, prepared for surgery and core temperature allowed to equilibrate prior to renal UR operative procedure. Rats were administered 10 ml/kg warm, sterile saline (s.c.; 25% pre- and 75% post-surgery) to minimize perturbations in body fluid volume. Core temperatures were maintained normative (37±0.2° C.) throughout ischemia duration. At t-0.5 hours, animals in Groups 7 and 8 also received an i.v. injection of compound as appropriate.

[0614] A laparotomy was then performed. At tO, rats were subjected to either sham (Group 1, n=4) or bilateral renal arterial ischemia (Groups 2-8; n=9/grp) using heat sterilized instruments, vascular occlusive clamps, and aseptic surgical technique. Following thirty (30) minutes of continuous ischemia time (t+0.5), the occlusive clamps were removed, the kidneys reperfused and the abdominal wound closed with sterile silk suture. Rats were administered 0.01 mg/kg buprenorphine as post-operative analgesic and allowed to recover briefly in a clean, heated cage. At t+1 hour, rats in Groups 1-6 were briefly restrained and received an i.v. injection of vehicle or Klotho compound in vehicle as appropriate. Rats in Groups 7 and 8 were also briefly restrained (but not injected) to control for handling stress. Rats were then immediately placed into metabolic cages.

[0615] Twenty-four (24) hours following reperfusion (D1), all animals had urine volumes determined and sampled. All animals then had blood (500 μl) collected on Li-Heparin by direct tail vein stick. Immediately post-bleed, rats received 500 μl warm saline. Urine and blood collection was repeated again on D2 (48 hours post-reperfusion) and D7 (168 hours post-reperfusion). On D2-D5, all rats were grouped housed under standard conditions in static caging and weighed, and underwent health observations daily. Whole blood (500 μl) was processed appropriately for the production of plasma and processed as described.

[0616] Clinical observations were conducted once daily following inception of dosing. With regard to data/tissues to be collected/calculated, animal health was observed daily following surgical procedure, and kidney mass (left and right kidney weights) was indexed to tibia length and body weight. Urine was collected at D1, D2 and D7 (targeting n=3 samples/animal; 500 μl/sample). At least one sample was subjected to clinical chemistry analysis (creatinine, protein) and at least one sample was optionally used for Kim-1 and NGAL analysis. Plasma was collected on Li-Heparin at D1, D2 and D7 (targeting n=2 samples/animal; 125 μl/sample). At least one sample was subjected to clinical chemistry analysis (creatinine, BUN).

[0617] On D7, rats were anesthetized with isoflurane immediately following bleed and tissues were harvested. Both left and right kidneys were immediately placed in ice-cold 0.9% NaCl, de-encapsulated and weighed. After tissue harvest (for histological and other analysis), all remaining inner cortical/outer medullary (i.e. S3/THAL enriched) from each sham and ischemic kidney (left and right kidney from each animal; 1 tube/kidney/animal) were snap frozen in appropriately labeled tube and stored at −80° C. for future potential biochemical analysis. Prior to any analyses being performed, cortical tissue was optionally cryogenically powdered and mixed to enable better homogeneity of the tissue sample across biochemical assays as well as limit introduction of sampling bias that may occur with cortical biopsies. At least one mid-transverse section of each sham and ischemic kidney (left and right from each animal) was optionally collected and immersion fixed in 10% neutral buffered formalin for histological analysis. The rats were then sacrificed.

### Example 10

[0618] The body weight of study rats were measured to test for the effect of Klotho protein administration on subjects. Table 80 presents a summary of study animals.

TABLE 80

| Group | Test Article |
|---|---|
| Group 01 | Vehicle only, PBS, pH 7.2 |
| Group 02 | Alpha Human Native Klotho, 10 μg/kg |
| Group 03 | Alpha Human Native Klotho, 30 μg/kg |
| Group 04 | Alpha Human Native Klotho, 100 μg/kg |
| Group 05 | Alpha Human Fc-Fusion Klotho, 3 μg/kg |
| Group 06 | Alpha Human Fc-Fusion Klotho, 10 μg/kg |
| Group 07 | Alpha Human Fc-Fusion Klotho, 30 μg/kg |

[0619] FIG. 44 illustrates, graphically, the average (mean) body weight (+/−standard error of the mean; SEM bars) of rats in each group over the course of the 12-day study (daily). Table 81, below, presents the corresponding data for mean body weight illustrated in FIG. 44, Table 82, below, presents the corresponding SEM illustrated in FIG. 44, and Table 83, below, presents the percent change in mean body weight of rats in each group over the course of the 12-day study (daily).

### Example 11

[0620] To study the therapeutic effect of Klotho administration on Acute Kidney Injury (AKI) following renal ischaemia reperfusion injury (IRI), Sprague-Dawley rats were randomly divided into either Sham or AKI groups, and the animals in each group were randomly allocated into vehicle or Klotho treatment. In humans, AKI is a formidable clinical problem resulting primarily from ischemia or nephrotoxins, with outcomes ranging from full recovery to the development of chronic kidney disease with dialysis dependence, or death. Animals in the Klotho group received one bolus intraperitoneal injection of recombinant mouse Klotho protein (0.01 mg/kg body weight) 30 or 60 min after reperfusion; rats in vehicle group received the same volume of Klotho buffer (150 mM NaCl and 10 mM HEPES pH 7.4). Twenty-four-hour urine and blood were collected on days 1, 2, and 7 after surgery. This study showed that a single bolus injection of murine S-Klotho 30 min post-injury was effective in attenuating (AKI) in animal model of the human condition.

### Example 12

[0621] To determine whether Klotho protects the lung against oxidant injury, Sprague-Dawley rats (body weight ˜300 g) were exposed to normoxia (N: 21% inspired O) or hyperoxia (H: 90% O) for 3 days while receiving intra-peritoneal injections of one of 3 preparations: Dulbeco's modified Eagle's Medium (DMEM) or conditioned medium (CM) from CHO cells overexpressing either Klotho (Klotho CM; ˜60 pmol) or empty vector (Control CM) (n=6-8 animals each). Injections were given 12 h before, and repeated at 24 h and 48 h during exposure.

[0622] Also, 3LL cells were transplanted at the flanks of athymic mice by subcutaneous injection (2×10⁶ cells per mouse) and treated with Klotho protein (0.01 mg/kg, intraperitoneal) or vehicle every other day for 10 days. Lungs were harvested 21 days after transplantation and the number of metastatic nodules was counted.

TABLE 81

| Group | Day 0 | Day 1 | Day 2 | Day 3 | Day 4 | Day 5 | Day 6 | Day 7 | Day 8 | Day 9 | Day 10 | Day 11 | Day 12 |
|---|---|---|---|---|---|---|---|---|---|---|---|---|---|
| 1 | 280.67 | 283.93 | 287.87 | 288.93 | 292.63 | 295.00 | 298.30 | 302.90 | 305.03 | 307.30 | 312.27 | 313.63 | 316.47 |
| 2 | 280.40 | 284.77 | 286.40 | 290.77 | 294.77 | 298.07 | 301.20 | 303.23 | 306.33 | 307.00 | 311.97 | 317.33 | 318.80 |
| 3 | 287.23 | 289.47 | 294.67 | 299.60 | 302.83 | 305.23 | 308.37 | 312.47 | 313.47 | 317.77 | 322.17 | 323.93 | 325.27 |
| 4 | 285.83 | 290.43 | 293.50 | 296.73 | 302.30 | 304.50 | 307.40 | 309.27 | 311.93 | 315.53 | 322.17 | 322.43 | 320.70 |
| 5 | 283.10 | 285.50 | 287.10 | 290.07 | 296.93 | 300.00 | 304.53 | 305.77 | 309.17 | 312.63 | 313.30 | 316.67 | 319.53 |
| 6 | 290.23 | 291.37 | 296.53 | 301.50 | 306.17 | 309.33 | 312.30 | 316.93 | 319.03 | 322.17 | 329.43 | 331.30 | 332.30 |
| 7 | 291.10 | 294.23 | 300.10 | 300.57 | 307.30 | 309.77 | 314.53 | 312.83 | 319.03 | 322.40 | 327.30 | 327.27 | 328.83 |

TABLE 82

| Group | Day 0 | Day 1 | Day 2 | Day 3 | Day 4 | Day 5 | Day 6 | Day 7 | Day 8 | Day 9 | Day 10 | Day 11 | Day 12 |
|---|---|---|---|---|---|---|---|---|---|---|---|---|---|
| 1 | 5.72 | 4.64 | 4.98 | 4.40 | 6.57 | 4.62 | 5.28 | 5.70 | 6.82 | 7.07 | 7.74 | 7.33 | 9.08 |
| 2 | 4.07 | 5.06 | 6.35 | 6.70 | 6.70 | 7.92 | 7.09 | 9.12 | 8.13 | 8.21 | 8.56 | 8.06 | 9.33 |
| 3 | 5.55 | 3.71 | 4.83 | 4.41 | 4.56 | 5.05 | 6.27 | 4.94 | 6.20 | 6.20 | 5.87 | 5.52 | 6.57 |
| 4 | 2.97 | 5.81 | 5.20 | 5.44 | 5.78 | 5.88 | 6.53 | 4.92 | 4.91 | 4.90 | 5.23 | 5.47 | 5.69 |
| 5 | 6.92 | 5.68 | 6.08 | 6.45 | 6.03 | 6.53 | 6.72 | 7.11 | 6.48 | 7.00 | 6.81 | 6.32 | 7.31 |
| 6 | 4.72 | 3.84 | 3.51 | 4.15 | 4.72 | 5.34 | 4.48 | 4.54 | 4.25 | 5.86 | 4.78 | 5.40 | 4.47 |
| 7 | 4.91 | 4.62 | 3.64 | 4.56 | 5.39 | 5.67 | 5.85 | 5.24 | 4.95 | 4.60 | 5.14 | 5.39 | 6.98 |

TABLE 83

| Group | Day 0 | Day 1 | Day 2 | Day 3 | Day 4 | Day 5 | Day 6 | Day 7 | Day 8 | Day 9 | Day 10 | Day 11 | Day 12 |
|---|---|---|---|---|---|---|---|---|---|---|---|---|---|
| 1 | 0.00% | 1.18% | 2.58% | 2.97% | 4.26% | 5.13% | 6.29% | 7.93% | 8.67% | 9.48% | 11.24% | 11.73% | 12.72% |
| 2 | 0.00% | 1.55% | 2.12% | 3.68% | 5.11% | 6.28% | 7.40% | 8.12% | 9.23% | 9.46% | 11.23% | 13.15% | 13.66% |
| 3 | 0.00% | 0.81% | 2.60% | 4.32% | 5.45% | 6.28% | 7.36% | 8.80% | 9.14% | 10.63% | 12.17% | 12.79% | 13.25% |
| 4 | 0.00% | 1.59% | 2.67% | 3.80% | 5.74% | 6.51% | 7.52% | 8.19% | 9.12% | 10.38% | 12.70% | 12.79% | 12.18% |
| 5 | 0.00% | 0.87% | 1.43% | 2.47% | 4.91% | 5.98% | 7.58% | 8.01% | 9.23% | 10.45% | 10.68% | 11.88% | 12.88% |
| 6 | 0.00% | 0.40% | 2.19% | 3.89% | 5.49% | 6.58% | 7.61% | 9.21% | 9.93% | 11.00% | 13.51% | 14.15% | 14.50% |
| 7 | 0.00% | 1.08% | 3.11% | 3.26% | 5.56% | 6.41% | 8.05% | 7.47% | 9.60% | 10.77% | 12.45% | 12.43% | 12.95% |

### Conclusion

[0623] Existing Klotho protein measurement may be prohibitively expensive and/or technically challenging for at-home collection and/or quantitative diagnostic. Embodiments of the present disclosure provide methods for monitoring, detecting and/or quantifying Klotho protein level(s), particularly endogenous and/or exogenous soluble alpha Klotho protein level(s), and more particularly soluble alpha Klotho protein levels, diagnosing Klotho protein deficiency, and/or increasing Klotho protein level(s), expression, or production, particularly endogenous and/or exogenous soluble alpha Klotho protein level(s), expression, or production, in a subject, and products useful in performing the same, including diagnostic kits and compositions for treating Klotho protein deficiency.

[0624] In addition, while gene therapy can be effective to increase certain protein levels in animal models or studies, the safety of gene therapy, especially for human treatment, is still questionable. Compared to viral delivery of the klotho gene to animal (cells), the administration of exogenous and/or recombinant protein in humans may be a safer, easier, and more direct modality to restore (endocrine) klotho levels. Preclinical data supports the therapeutic potential of soluble Klotho protein for age-related disorders and klotho deficiency-associated diseases. Epidemiological data has shown that soluble Klotho is lower in the elderly than in young adults, and that levels of soluble Klotho are inversely correlated with age, indicating that aging may be associated with soluble Klotho decline. Generally, however, the production and administration of exogenous and/or recombinant protein to humans is tightly regulated by government and other entities. Because of the time and expense associated with regulatory compliance, the cost of such treatments can be prohibitive for developers, manufactures, and patients alike. Compositions and methods of the present disclosure, however, can provide a viable and effective option for increasing endogenous Klotho protein levels in humans and non-human animals without one or more of the drawbacks associated with other solutions. In particular, some embodiments of the present disclosure include products, compositions, and/or methods of manufacturing and/or using recombinant human Klotho proteins, such as (Current Good Manufacturing Practice (cGMP)-grade) human recombinant soluble alpha-Klotho proteins, protein fragments, and/or protein variants. In addition, some embodiments of the present disclosure include (nutraceutical or health supplement) products, compositions, and/or methods for (naturally) increasing (endogenous and/or serum soluble) Klotho protein level(s), expression, or production in a patient or subject.

[0625] Those skilled in the art will appreciate that each of the therapeutic effects, indications, and/or treatments outlined herein in relation to recombinant, therapeutic Klotho proteins and products, compositions, and methods related thereto can be achieved by (naturally) increasing, enhancing, augmenting, and/or supporting endogenous Klotho protein production and/or level(s). Those skilled in the art will also appreciate that each of the therapeutic effects, indications, and/or treatments outlined herein in relation to (naturally) increasing, enhancing, augmenting, and/or supporting endogenous Klotho protein production and/or level(s) can be achieved by administering recombinant, therapeutic Klotho proteins and products, compositions, and through methods related thereto. Accordingly, and for the sake of brevity, the present disclosure need not rehearse each of the disclosed therapeutic effects, indications, and/or treatments with reference to both (i) the administration of recombinant, therapeutic Klotho proteins, and (ii) the administration of the health supplement or nutraceutical compositions of the present disclosure, as such are clearly contemplated herein.

[0626] While the foregoing detailed description makes reference to specific exemplary embodiments, the present disclosure may be embodied in other specific forms without departing from its spirit or essential characteristics. Accordingly, the described embodiments are to be considered in all respects only as illustrative and not restrictive. For instance, various substitutions, alterations, and/or modifications of the inventive features described and/or illustrated herein, and additional applications of the principles described and/or illustrated herein, which would occur to one skilled in the relevant art and having possession of this disclosure, can be made to the described and/or illustrated embodiments without departing from the spirit and scope of the disclosure as defined by the appended claims. Such substitutions, alterations, and/or modifications are to be considered within the scope of this disclosure.

[0627] The scope of the invention is, therefore, indicated by the appended claims rather than by the foregoing description. The limitations recited in the claims are to be interpreted broadly based on the language employed in the claims and not limited to specific examples described in the foregoing detailed description, which examples are to be construed as non-exclusive and non-exhaustive. All changes which come within the meaning and range of equivalency of the claims are to be embraced within their scope.

[0628] It will also be appreciated that various features of certain embodiments can be compatible with, combined with, included in, and/or incorporated into other embodiments of the present disclosure. For instance, systems, methods, and/or products according to certain embodiments of the present disclosure may include, incorporate, or otherwise comprise features described in other embodiments disclosed and/or described herein. Thus, disclosure of certain features relative to a specific embodiment of the present disclosure should not be construed as limiting application or inclusion of said features to the specific embodiment.

[0629] In addition, unless a feature is described as being required in a particular embodiment, features described in the various embodiments can be optional and may not be included in other embodiments of the present disclosure. Moreover, unless a feature is described as requiring another feature in combination therewith, any feature herein may be combined with any other feature of a same or different embodiment disclosed herein. It will be appreciated that while features may be optional in certain embodiments, when features are included in such embodiments, they can be required to have a specific configuration as described in the present disclosure.

[0630] Likewise, any steps recited in any method or process described herein and/or recited in the claims can be executed in any suitable order and are not necessarily limited to the order described and/or recited, unless otherwise stated (explicitly or implicitly). Such steps can, however, also be required to be performed in a specific order or any suitable order in certain embodiments of the present disclosure.

[0631] Furthermore, various well-known aspects of illustrative systems, methods, products, and the like are not described herein in particular detail in order to avoid obscuring aspects of the example embodiments. Such aspects are, however, also contemplated herein.

We claim:

1. A method of stabilizing Klotho protein in a mammalian blood sample, the method comprising:
obtaining capillary blood from a mammalian subject, the capillary blood containing an amount of soluble Klotho protein; and
storing the capillary blood in a container for at least 24 hours at room temperature or without freezing, the container having a preservative or anti-coagulant disposed therein, the preservative or anti-coagulant being mixed with the capillary blood in the container, the preservative or anti-coagulant stabilizing the soluble Klotho protein for at least 24 hours at room temperature or without freezing, the preservative or anti-coagulant comprising one or more of heparin, lithium heparin, EDTA, and K₂ EDTA.

2. The method of claim 1, further comprising storing the capillary blood mixed with the preservative or anti-coagulant for at least 3 days at room temperature or without freezing, the preservative or anti-coagulant stabilizing the soluble Klotho protein for at least 3 days at room temperature or without freezing.

3. The method of claim 1, further comprising storing the capillary blood mixed with the preservative or anti-coagulant for at least 7 days at room temperature or without freezing, the preservative or anti-coagulant stabilizing the soluble Klotho protein for at least 7 days at room temperature or without freezing.

4. The method of claim 1, further comprising, after the storing step, quantifying the amount of soluble Klotho protein or assaying for the presence of the soluble Klotho protein.

5. The method of claim 4, wherein the step of quantifying the amount of soluble Klotho protein comprises detecting the soluble Klotho protein using mass spectrometry, Multi-Analyte Profiling (xMAP), and/or a first antibody that binds to a portion of the soluble Klotho protein.

6. The method of claim 5, wherein the step of quantifying the amount of soluble Klotho protein further comprises detecting the soluble Klotho protein using a detection antibody that binds to a portion of the first antibody or performing an enzyme-linked immunosorbent assay (ELISA) to detect and optionally quantify the soluble Klotho protein.

7. The method of claim 1, wherein the step of obtaining capillary blood comprises one or more of lancing skin of the mammal with a lancet and collecting the capillary blood in the container.

8. The method of claim 1, wherein the capillary blood is between about 10-1000 ul, preferably about 50-200 ul of the capillary blood, or wherein the step of obtaining capillary blood includes obtaining between about 10-1000 ul, preferably about 50-200 ul of the capillary blood.

9. A method of diagnosing Klotho deficiency in a mammalian subject, the method comprising:
obtaining a fluid sample mixture selected from the group consisting of:
mammalian serum, optionally in the form of capillary blood, mixed with a preservative or anti-coagulant comprising one or more of heparin, lithium heparin, EDTA, and K₂ EDTA, the mammalian serum having an amount of soluble Klotho protein; and
mammalian serum, optionally in the form of capillary blood, the mammalian serum having an amount of soluble Klotho protein, the method further comprising mixing the mammalian serum with a preservative or anti-coagulant comprising one or more of heparin, lithium heparin, EDTA, and K₂ EDTA to form the mixture;
storing the mixture for at least 24 hours at room temperature or without freezing, the preservative or anti-coagulant stabilizing the soluble Klotho protein for at least 24 hours at room temperature or without freezing;
after the storing step, quantifying the amount of the soluble Klotho protein in the mixture; and
diagnosing the mammalian subject with Klotho deficiency when the quantified amount of soluble Klotho protein in the mixture is less than a predetermined threshold amount.

10. The method of claim 9, wherein the fluid sample mixture comprises about 10-1000 ul, preferably about 50-200 ul of capillary blood from the mammalian subject, or wherein the step of obtaining the fluid sample mixture comprises obtaining about 10-1000 ul, preferably about 50-200 ul of capillary blood from the mammalian subject.

11. The method of claim 9, wherein the step of quantifying the amount of the soluble Klotho protein in the mixture comprises detecting the soluble Klotho protein using mass spectrometry, Multi-Analyte Profiling (xMAP), and/or a first antibody that binds to a portion of the soluble Klotho protein and, optionally, a detection antibody that binds to a portion of the first antibody, or performing an enzyme-linked immunosorbent assay (ELISA) to detect and optionally quantify the soluble Klotho protein.

12. The method of claim 9, wherein diagnosing the mammalian subject with Klotho deficiency comprises displaying a Klotho deficiency determination or diagnosis on a user interface of a computer system and/or producing a file or report, in physical or electronic form, that displays the Klotho deficiency determination or diagnosis, the Klotho deficiency determination or diagnosis optionally including the quantified amount of the soluble Klotho protein and/or the predetermined threshold amount.

13. A method of treating Klotho deficiency in a mammalian subject, the method comprising:
obtaining serum or capillary blood, from a mammalian subject, the serum or capillary blood having an amount of soluble Klotho protein;
storing the serum or capillary blood in a container for at least 24 hours at room temperature or without freezing, the container having a preservative or anti-coagulant disposed therein and mixed with the serum or capillary blood to form a mixture, the preservative or anti-coagulant stabilizing the soluble Klotho protein for at least 24 hours at room temperature or without freezing, the preservative or anti-coagulant comprising one or more of heparin, lithium heparin, EDTA, and K₂ EDTA;
after the storing step, quantifying the amount of the soluble Klotho protein in the mixture;
diagnosing the mammalian subject with Klotho deficiency when the quantified amount of soluble Klotho protein in the mixture is less than a predetermined threshold amount; and
administering a composition to the mammalian subject after diagnosing the mammalian subject with Klotho deficiency, the composition comprising one or more of:
one or more pharmaceutical composition comprising a pharmaceutically-acceptable carrier or excipient and a pharmaceutically effective amount of a recombinant Klotho protein, recombinant Klotho protein fragment, or recombinant Klotho fusion protein disposed in the carrier or excipient;
one or more nutraceutical composition comprising a plurality of components adapted to raise serum soluble Klotho protein levels by increasing or enhancing endogenous production of soluble Klotho protein by the mammalian subject; and
one or more pharmaceutical composition that increases endogenous Klotho levels, optionally selected from the group consisting of a blood pressure medication, an Angiotensin II receptor blocker (ARB), an Angiotensin-converting enzyme (ACE) inhibitor, Losartan, Valsartan, Telmisartan, an AT1 receptor antagonist or blocker, testosterone, growth hormone, a growth hormone releasing peptide, sermorelin, prescription or prescription-strength vitamin D, 1,25-dihydroxycholecalciferol, calcitrol, paricalcitrol, an Indoxyl sulphate binder, Kremezin, AST-120, a statins, a PPAR agonists, troglitazone, and rosiglitazone.

14. The method of claim 13, wherein the administering step comprises:
an oral or oral-related administration, optionally selected from the group consisting of ingestion, buccal administration, and sublingual administration, optionally in modified-release form;
one or more bolus or gradual injection, optionally selected from intravenous, intradermal, intraperitoneal, intramuscular, intracutaneous, and subcutaneous injection, optionally in modified-release form.

15. The method of claim 13, wherein the step of obtaining serum or capillary blood comprises one or more of:
lancing skin of the mammalian subject with a lancet;
obtaining between about 10-1000 ul, preferably about 50-200 ul of the capillary blood; and
collecting the capillary blood in a container having a preservative or anti-coagulant disposed therein or added thereto, the capillary blood optionally being between about 10-1000 ul, preferably about 50-200 ul of capillary blood.

16. The method of claim 13, wherein the pharmaceutical composition comprises a pharmaceutically-effective amount of a recombinant Klotho protein, recombinant Klotho protein fragment, or recombinant Klotho fusion protein having at least 80% amino acid sequence identity to at least a portion of one of SEQ ID NO: 2 through SEQ ID NO: 70 or SEQ ID NO: 107 through SEQ ID NO: 120 or SEQ ID NO: 125 through SEQ ID NO: 128 or SEQ ID NO: 133 or SEQ ID NO: 152.

17. The method of claim 16, wherein the pharmaceutical composition comprises a pharmaceutically-effective amount of a recombinant Klotho fusion protein comprising at least a portion of an immunoglobulin Fc domain sequence or human serum albumin sequence fused to at least a portion of a soluble Klotho protein sequence, with or without a linker sequence therebetween.

18. The method of claim 13, wherein the nutraceutical composition comprises two or more components selected from the group consisting of vitamin C, vitamin D3, vitamin E, N-acetylcysteine (NAC), quercetin dihydrate, rosmarinic acid (RA), pterostilbene, docosahexaenoic acid (DHA), nicotinamide riboside (NR), nicotinamide adenine dinucleotide (NAD+), nicotinamide mononucleotide (NMN), and one or more probiotic.

19. The method of claim 18, wherein the one or more probiotic comprises an effective amount of the Bifidobacterium species and/or strains Bifidobacterium lactis BL-04, Bifidobacterium bifidum/lactis BB-02, and Bifidobacterium longum BL-05, and the Lactobacillus species and/or strains Lactobacillus acidophilus LA-14, Lactobacillus rhamnosus LR-32, and Lactobacillus paracasei LPC-37.

20. A method of purifying a pharmaceutical grade recombinant Klotho protein, recombinant Klotho protein fragment, or recombinant Klotho fusion protein, the method comprising:
obtaining a suspension cell culture fluid comprising (i) recombinant Klotho protein, recombinant Klotho protein fragment, or recombinant Klotho fusion protein and (ii) one or more contaminants;
performing a purification step using affinity chromatography in which the recombinant Klotho protein, recombinant Klotho protein fragment, or recombinant Klotho fusion protein is bound to Protein A or other affinity entity, optionally washed, and eluted from Protein A with and elution buffer having a pH between about pH 2 and about pH 6 and a salt concentration between about 1 M and about 6 M, the salt optionally comprising MgCl₂;
performing a purification step using size exclusion chromatography in which the eluted recombinant Klotho protein, recombinant Klotho protein fragment, or recombinant Klotho fusion protein is further eluted in a mobile phase buffer, the mobile phase buffer having a buffering agent and one or more optional reducing agent, the buffering agent optionally being other than a phosphate-containing buffer, the reducing agent optionally comprising L-Methionine and/or Sodium Thioglycolate, the mobile phase buffer optionally having a pH between about pH 6 and about pH 10,
wherein at least some of the further eluted recombinant Klotho protein, recombinant Klotho protein fragment, or recombinant Klotho fusion protein is optionally in multimeric form.

21. The method of claim 21, wherein the recombinant Klotho protein, recombinant Klotho protein fragment, or recombinant Klotho fusion protein has at least 80% amino acid sequence identity to at least a portion of one of SEQ ID NO: 2 through SEQ ID NO: 70 or SEQ ID NO: 107 through SEQ ID NO: 120 or SEQ ID NO: 125 through SEQ ID NO: 128 or SEQ ID NO: 133 or SEQ ID NO: 152.

The application's sequence listing, which the Patent Office published only in electronic form, follows.

SEQUENCE LISTING (152 sequences)

SEQ ID NO: 1 - protein, 1012 aa, Homo sapiens
MPASAPPRRPRPPPPSLSLLLVLLGLGGRRLRAEPGDGAQTWARFSRPPAPEAAGLFQGTFPDGFLWAVGSAAYQTEGGWQQHGKGASIWDTFTHHPLAPPGDSRNASLPLGAPSPLQPATGDVASDSYNNVFRDTEALRELGVTHYRFSISWARVLPNGSAGVPNREGLRYYRRLLERLRELGVQPVVTLYHWDLPQRLQDAYGGWANRALADHFRDYAELCFRHFGGQVKYWITIDNPYVVAWHGYATGRLAPGIRGSPRLGYLVAHNLLLAHAKVWHLYNTSFRPTQGGQVSIALSSHWINPRRMTDHSIKECQKSLDFVLGWFAKPVFIDGDYPESMKNNLSSILPDFTESEKKFIKGTADFFALCFGPTLSFQLLDPHMKFRQLESPNLRQLLSWIDLEFNHPQIFIVENGWFVSGTTKRDDAKYMYYLKKFIMETLKAIKLDGVDVIGYTAWSLMDGFEWHRGYSIRRGLFYVDFLSQDKMLLPKSSALFYQKLIEKNGFPPLPENQPLEGTFPCDFAWGVVDNYIQVDTTLSQFTDLNVYLWDVHHSKRLIKVDGVVTKKRKSYCVDFAAIQPQIALLQEMHVTHFRFSLDWALILPLGNQSQVNHTILQYYRCMASELVRVNITPVVALWQPMAPNQGLPRLLARQGAWENPYTALAFAEYARLCFQELGHHVKLWITMNEPYTRNMTYSAGHNLLKAHALAWHVYNEKFRHAQNGKISIALQADWIEPACPFSQKDKEVAERVLEFDIGWLAEPIFGSGDYPWVMRDWLNQRNNFLLPYFTEDEKKLIQGTFDFLALSHYTTILVDSEKEDPIKYNDYLEVQEMTDITWLNSPSQVAVVPWGLRKVLNWLKFKYGDLPMYIISNGIDDGLHAEDDQLRVYYMQNYINEALKAHILDGINLCGYFAYSFNDRTAPRFGLYRYAADQFEPKASMKHYRKIIDSNGFPGPETLERFCPEEFTVCTECSFFHTRKSLLAFIAFLFFASIISLSLIFYYSKKGRRSYK

SEQ ID NO: 2 - protein, 981 aa, Homo sapiens
MPASAPPRRPRPPPPSLSLLLVLLGLGGRRLRAEPGDGAQTWARFSRPPAPEAAGLFQGTFPDGFLWAVGSAAYQTEGGWQQHGKGASIWDTFTHHPLAPPGDSRNASLPLGAPSPLQPATGDVASDSYNNVFRDTEALRELGVTHYRFSISWARVLPNGSAGVPNREGLRYYRRLLERLRELGVQPVVTLYHWDLPQRLQDAYGGWANRALADHFRDYAELCFRHFGGQVKYWITIDNPYVVAWHGYATGRLAPGIRGSPRLGYLVAHNLLLAHAKVWHLYNTSFRPTQGGQVSIALSSHWINPRRMTDHSIKECQKSLDFVLGWFAKPVFIDGDYPESMKNNLSSILPDFTESEKKFIKGTADFFALCFGPTLSFQLLDPHMKFRQLESPNLRQLLSWIDLEFNHPQIFIVENGWFVSGTTKRDDAKYMYYLKKFIMETLKAIKLDGVDVIGYTAWSLMDGFEWHRGYSIRRGLFYVDFLSQDKMLLPKSSALFYQKLIEKNGFPPLPENQPLEGTFPCDFAWGVVDNYIQVDTTLSQFTDLNVYLWDVHHSKRLIKVDGVVTKKRKSYCVDFAAIQPQIALLQEMHVTHFRFSLDWALILPLGNQSQVNHTILQYYRCMASELVRVNITPVVALWQPMAPNQGLPRLLARQGAWENPYTALAFAEYARLCFQELGHHVKLWITMNEPYTRNMTYSAGHNLLKAHALAWHVYNEKFRHAQNGKISIALQADWIEPACPFSQKDKEVAERVLEFDIGWLAEPIFGSGDYPWVMRDWLNQRNNFLLPYFTEDEKKLIQGTFDFLALSHYTTILVDSEKEDPIKYNDYLEVQEMTDITWLNSPSQVAVVPWGLRKVLNWLKFKYGDLPMYIISNGIDDGLHAEDDQLRVYYMQNYINEALKAHILDGINLCGYFAYSFNDRTAPRFGLYRYAADQFEPKASMKHYRKIIDSNGFPGPETLERFCPEEFTVCTECSFFHTRKS

SEQ ID NO: 3 - protein, 953 aa, Homo sapiens
RRLRAEPGDGAQTWARFSRPPAPEAAGLFQGTFPDGFLWAVGSAAYQTEGGWQQHGKGASIWDTFTHHPLAPPGDSRNASLPLGAPSPLQPATGDVASDSYNNVFRDTEALRELGVTHYRFSISWARVLPNGSAGVPNREGLRYYRRLLERLRELGVQPVVTLYHWDLPQRLQDAYGGWANRALADHFRDYAELCFRHFGGQVKYWITIDNPYVVAWHGYATGRLAPGIRGSPRLGYLVAHNLLLAHAKVWHLYNTSFRPTQGGQVSIALSSHWINPRRMTDHSIKECQKSLDFVLGWFAKPVFIDGDYPESMKNNLSSILPDFTESEKKFIKGTADFFALCFGPTLSFQLLDPHMKFRQLESPNLRQLLSWIDLEFNHPQIFIVENGWFVSGTTKRDDAKYMYYLKKFIMETLKAIKLDGVDVIGYTAWSLMDGFEWHRGYSIRRGLFYVDFLSQDKMLLPKSSALFYQKLIEKNGFPPLPENQPLEGTFPCDFAWGVVDNYIQVDTTLSQFTDLNVYLWDVHHSKRLIKVDGVVTKKRKSYCVDFAAIQPQIALLQEMHVTHFRFSLDWALILPLGNQSQVNHTILQYYRCMASELVRVNITPVVALWQPMAPNQGLPRLLARQGAWENPYTALAFAEYARLCFQELGHHVKLWITMNEPYTRNMTYSAGHNLLKAHALAWHVYNEKFRHAQNGKISIALQADWIEPACPFSQKDKEVAERVLEFDIGWLAEPIFGSGDYPWVMRDWLNQRNNFLLPYFTEDEKKLIQGTFDFLALSHYTTILVDSEKEDPIKYNDYLEVQEMTDITWLNSPSQVAVVPWGLRKVLNWLKFKYGDLPMYIISNGIDDGLHAEDDQLRVYYMQNYINEALKAHILDGINLCGYFAYSFNDRTAPRFGLYRYAADQFEPKASMKHYRKIIDSNGFPGPETLERFCPEEFTVCTECSFFHTRKS

SEQ ID NO: 4 - protein, 948 aa, Homo sapiens
EPGDGAQTWARFSRPPAPEAAGLFQGTFPDGFLWAVGSAAYQTEGGWQQHGKGASIWDTFTHHPLAPPGDSRNASLPLGAPSPLQPATGDVASDSYNNVFRDTEALRELGVTHYRFSISWARVLPNGSAGVPNREGLRYYRRLLERLRELGVQPVVTLYHWDLPQRLQDAYGGWANRALADHFRDYAELCFRHFGGQVKYWITIDNPYVVAWHGYATGRLAPGIRGSPRLGYLVAHNLLLAHAKVWHLYNTSFRPTQGGQVSIALSSHWINPRRMTDHSIKECQKSLDFVLGWFAKPVFIDGDYPESMKNNLSSILPDFTESEKKFIKGTADFFALCFGPTLSFQLLDPHMKFRQLESPNLRQLLSWIDLEFNHPQIFIVENGWFVSGTTKRDDAKYMYYLKKFIMETLKAIKLDGVDVIGYTAWSLMDGFEWHRGYSIRRGLFYVDFLSQDKMLLPKSSALFYQKLIEKNGFPPLPENQPLEGTFPCDFAWGVVDNYIQVDTTLSQFTDLNVYLWDVHHSKRLIKVDGVVTKKRKSYCVDFAAIQPQIALLQEMHVTHFRFSLDWALILPLGNQSQVNHTILQYYRCMASELVRVNITPVVALWQPMAPNQGLPRLLARQGAWENPYTALAFAEYARLCFQELGHHVKLWITMNEPYTRNMTYSAGHNLLKAHALAWHVYNEKFRHAQNGKISIALQADWIEPACPFSQKDKEVAERVLEFDIGWLAEPIFGSGDYPWVMRDWLNQRNNFLLPYFTEDEKKLIQGTFDFLALSHYTTILVDSEKEDPIKYNDYLEVQEMTDITWLNSPSQVAVVPWGLRKVLNWLKFKYGDLPMYIISNGIDDGLHAEDDQLRVYYMQNYINEALKAHILDGINLCGYFAYSFNDRTAPRFGLYRYAADQFEPKASMKHYRKIIDSNGFPGPETLERFCPEEFTVCTECSFFHTRKS

SEQ ID NO: 5 - protein, 946 aa, Homo sapiens
GDGAQTWARFSRPPAPEAAGLFQGTFPDGFLWAVGSAAYQTEGGWQQHGKGASIWDTFTHHPLAPPGDSRNASLPLGAPSPLQPATGDVASDSYNNVFRDTEALRELGVTHYRFSISWARVLPNGSAGVPNREGLRYYRRLLERLRELGVQPVVTLYHWDLPQRLQDAYGGWANRALADHFRDYAELCFRHFGGQVKYWITIDNPYVVAWHGYATGRLAPGIRGSPRLGYLVAHNLLLAHAKVWHLYNTSFRPTQGGQVSIALSSHWINPRRMTDHSIKECQKSLDFVLGWFAKPVFIDGDYPESMKNNLSSILPDFTESEKKFIKGTADFFALCFGPTLSFQLLDPHMKFRQLESPNLRQLLSWIDLEFNHPQIFIVENGWFVSGTTKRDDAKYMYYLKKFIMETLKAIKLDGVDVIGYTAWSLMDGFEWHRGYSIRRGLFYVDFLSQDKMLLPKSSALFYQKLIEKNGFPPLPENQPLEGTFPCDFAWGVVDNYIQVDTTLSQFTDLNVYLWDVHHSKRLIKVDGVVTKKRKSYCVDFAAIQPQIALLQEMHVTHFRFSLDWALILPLGNQSQVNHTILQYYRCMASELVRVNITPVVALWQPMAPNQGLPRLLARQGAWENPYTALAFAEYARLCFQELGHHVKLWITMNEPYTRNMTYSAGHNLLKAHALAWHVYNEKFRHAQNGKISIALQADWIEPACPFSQKDKEVAERVLEFDIGWLAEPIFGSGDYPWVMRDWLNQRNNFLLPYFTEDEKKLIQGTFDFLALSHYTTILVDSEKEDPIKYNDYLEVQEMTDITWLNSPSQVAVVPWGLRKVLNWLKFKYGDLPMYIISNGIDDGLHAEDDQLRVYYMQNYINEALKAHILDGINLCGYFAYSFNDRTAPRFGLYRYAADQFEPKASMKHYRKIIDSNGFPGPETLERFCPEEFTVCTECSFFHTRKS

SEQ ID NO: 6 - protein, 851 aa, Homo sapiens
NVFRDTEALRELGVTHYRFSISWARVLPNGSAGVPNREGLRYYRRLLERLRELGVQPVVTLYHWDLPQRLQDAYGGWANRALADHFRDYAELCFRHFGGQVKYWITIDNPYVVAWHGYATGRLAPGIRGSPRLGYLVAHNLLLAHAKVWHLYNTSFRPTQGGQVSIALSSHWINPRRMTDHSIKECQKSLDFVLGWFAKPVFIDGDYPESMKNNLSSILPDFTESEKKFIKGTADFFALCFGPTLSFQLLDPHMKFRQLESPNLRQLLSWIDLEFNHPQIFIVENGWFVSGTTKRDDAKYMYYLKKFIMETLKAIKLDGVDVIGYTAWSLMDGFEWHRGYSIRRGLFYVDFLSQDKMLLPKSSALFYQKLIEKNGFPPLPENQPLEGTFPCDFAWGVVDNYIQVDTTLSQFTDLNVYLWDVHHSKRLIKVDGVVTKKRKSYCVDFAAIQPQIALLQEMHVTHFRFSLDWALILPLGNQSQVNHTILQYYRCMASELVRVNITPVVALWQPMAPNQGLPRLLARQGAWENPYTALAFAEYARLCFQELGHHVKLWITMNEPYTRNMTYSAGHNLLKAHALAWHVYNEKFRHAQNGKISIALQADWIEPACPFSQKDKEVAERVLEFDIGWLAEPIFGSGDYPWVMRDWLNQRNNFLLPYFTEDEKKLIQGTFDFLALSHYTTILVDSEKEDPIKYNDYLEVQEMTDITWLNSPSQVAVVPWGLRKVLNWLKFKYGDLPMYIISNGIDDGLHAEDDQLRVYYMQNYINEALKAHILDGINLCGYFAYSFNDRTAPRFGLYRYAADQFEPKASMKHYRKIIDSNGFPGPETLERFCPEEFTVCTECSFFHTRKS

SEQ ID NO: 7 - protein, 549 aa, Homo sapiens
MPASAPPRRPRPPPPSLSLLLVLLGLGGRRLRAEPGDGAQTWARFSRPPAPEAAGLFQGTFPDGFLWAVGSAAYQTEGGWQQHGKGASIWDTFTHHPLAPPGDSRNASLPLGAPSPLQPATGDVASDSYNNVFRDTEALRELGVTHYRFSISWARVLPNGSAGVPNREGLRYYRRLLERLRELGVQPVVTLYHWDLPQRLQDAYGGWANRALADHFRDYAELCFRHFGGQVKYWITIDNPYVVAWHGYATGRLAPGIRGSPRLGYLVAHNLLLAHAKVWHLYNTSFRPTQGGQVSIALSSHWINPRRMTDHSIKECQKSLDFVLGWFAKPVFIDGDYPESMKNNLSSILPDFTESEKKFIKGTADFFALCFGPTLSFQLLDPHMKFRQLESPNLRQLLSWIDLEFNHPQIFIVENGWFVSGTTKRDDAKYMYYLKKFIMETLKAIKLDGVDVIGYTAWSLMDGFEWHRGYSIRRGLFYVDFLSQDKMLLPKSSALFYQKLIEKNGFPPLPENQPLEGTFPCDFAWGVVDNYIQVDTTLSQFTDLNVYLW

SEQ ID NO: 8 - protein, 521 aa, Homo sapiens
RRLRAEPGDGAQTWARFSRPPAPEAAGLFQGTFPDGFLWAVGSAAYQTEGGWQQHGKGASIWDTFTHHPLAPPGDSRNASLPLGAPSPLQPATGDVASDSYNNVFRDTEALRELGVTHYRFSISWARVLPNGSAGVPNREGLRYYRRLLERLRELGVQPVVTLYHWDLPQRLQDAYGGWANRALADHFRDYAELCFRHFGGQVKYWITIDNPYVVAWHGYATGRLAPGIRGSPRLGYLVAHNLLLAHAKVWHLYNTSFRPTQGGQVSIALSSHWINPRRMTDHSIKECQKSLDFVLGWFAKPVFIDGDYPESMKNNLSSILPDFTESEKKFIKGTADFFALCFGPTLSFQLLDPHMKFRQLESPNLRQLLSWIDLEFNHPQIFIVENGWFVSGTTKRDDAKYMYYLKKFIMETLKAIKLDGVDVIGYTAWSLMDGFEWHRGYSIRRGLFYVDFLSQDKMLLPKSSALFYQKLIEKNGFPPLPENQPLEGTFPCDFAWGVVDNYIQVDTTLSQFTDLNVYLW

SEQ ID NO: 9 - protein, 516 aa, Homo sapiens
EPGDGAQTWARFSRPPAPEAAGLFQGTFPDGFLWAVGSAAYQTEGGWQQHGKGASIWDTFTHHPLAPPGDSRNASLPLGAPSPLQPATGDVASDSYNNVFRDTEALRELGVTHYRFSISWARVLPNGSAGVPNREGLRYYRRLLERLRELGVQPVVTLYHWDLPQRLQDAYGGWANRALADHFRDYAELCFRHFGGQVKYWITIDNPYVVAWHGYATGRLAPGIRGSPRLGYLVAHNLLLAHAKVWHLYNTSFRPTQGGQVSIALSSHWINPRRMTDHSIKECQKSLDFVLGWFAKPVFIDGDYPESMKNNLSSILPDFTESEKKFIKGTADFFALCFGPTLSFQLLDPHMKFRQLESPNLRQLLSWIDLEFNHPQIFIVENGWFVSGTTKRDDAKYMYYLKKFIMETLKAIKLDGVDVIGYTAWSLMDGFEWHRGYSIRRGLFYVDFLSQDKMLLPKSSALFYQKLIEKNGFPPLPENQPLEGTFPCDFAWGVVDNYIQVDTTLSQFTDLNVYLW

SEQ ID NO: 10 - protein, 514 aa, Homo sapiens
GDGAQTWARFSRPPAPEAAGLFQGTFPDGFLWAVGSAAYQTEGGWQQHGKGASIWDTFTHHPLAPPGDSRNASLPLGAPSPLQPATGDVASDSYNNVFRDTEALRELGVTHYRFSISWARVLPNGSAGVPNREGLRYYRRLLERLRELGVQPVVTLYHWDLPQRLQDAYGGWANRALADHFRDYAELCFRHFGGQVKYWITIDNPYVVAWHGYATGRLAPGIRGSPRLGYLVAHNLLLAHAKVWHLYNTSFRPTQGGQVSIALSSHWINPRRMTDHSIKECQKSLDFVLGWFAKPVFIDGDYPESMKNNLSSILPDFTESEKKFIKGTADFFALCFGPTLSFQLLDPHMKFRQLESPNLRQLLSWIDLEFNHPQIFIVENGWFVSGTTKRDDAKYMYYLKKFIMETLKAIKLDGVDVIGYTAWSLMDGFEWHRGYSIRRGLFYVDFLSQDKMLLPKSSALFYQKLIEKNGFPPLPENQPLEGTFPCDFAWGVVDNYIQVDTTLSQFTDLNVYLW

SEQ ID NO: 11 - protein, 419 aa, Homo sapiens
NVFRDTEALRELGVTHYRFSISWARVLPNGSAGVPNREGLRYYRRLLERLRELGVQPVVTLYHWDLPQRLQDAYGGWANRALADHFRDYAELCFRHFGGQVKYWITIDNPYVVAWHGYATGRLAPGIRGSPRLGYLVAHNLLLAHAKVWHLYNTSFRPTQGGQVSIALSSHWINPRRMTDHSIKECQKSLDFVLGWFAKPVFIDGDYPESMKNNLSSILPDFTESEKKFIKGTADFFALCFGPTLSFQLLDPHMKFRQLESPNLRQLLSWIDLEFNHPQIFIVENGWFVSGTTKRDDAKYMYYLKKFIMETLKAIKLDGVDVIGYTAWSLMDGFEWHRGYSIRRGLFYVDFLSQDKMLLPKSSALFYQKLIEKNGFPPLPENQPLEGTFPCDFAWGVVDNYIQVDTTLSQFTDLNVYLW

SEQ ID NO: 12 - protein, 981 aa, Homo sapiens
MPASAPPRRPRPPPPSLSLLLVLLGLGGRRLRAEPGDGAQTWARFSRPPAPEAAGLFQGTFPDGFLWAVGSAAYQTEGGWQQHGKGASIWDTFTHHPLAPPGDSRNASLPLGAPSPLQPATGDVASDSYNNVFRDTEALRELGVTHYRFSISWARVLPNGSAGVPNREGLRYYRRLLERLRELGVQPVVTLYHWDLPQRLQDAYGGWANRALADHFRDYAELCFRHFGGQVKYWITIDNPYVVAWHGYATGRLAPGIRGSPRLGYLVAHNLLLAHAKVWHLYNTSFRPTQGGQVSIALSSHWINPRRMTDHSIKECQKSLDFVLGWFAKPVFIDGDYPESMKNNLSSILPDFTESEKKFIKGTADFFALSFGPTLSFQLLDPHMKFRQLESPNLRQLLSWIDLEFNHPQIFIVENGWFVSGTTKRDDAKYMYYLKKFIMETLKAIKLDGVDVIGYTAWSLMDGFEWHRGYSIRRGLFYVDFLSQDKMLLPKSSALFYQKLIEKNGFPPLPENQPLEGTFPCDFAWGVVDNYIQVDTTLSQFTDLNVYLWDVHHSKRLIKVDGVVTKKRKSYCVDFAAIQPQIALLQEMHVTHFRFSLDWALILPLGNQSQVNHTILQYYRCMASELVRVNITPVVALWQPMAPNQGLPRLLARQGAWENPYTALAFAEYARLCFQELGHHVKLWITMNEPYTRNMTYSAGHNLLKAHALAWHVYNEKFRHAQNGKISIALQADWIEPACPFSQKDKEVAERVLEFDIGWLAEPIFGSGDYPWVMRDWLNQRNNFLLPYFTEDEKKLIQGTFDFLALSHYTTILVDSEKEDPIKYNDYLEVQEMTDITWLNSPSQVAVVPWGLRKVLNWLKFKYGDLPMYIISNGIDDGLHAEDDQLRVYYMQNYINEALKAHILDGINLCGYFAYSFNDRTAPRFGLYRYAADQFEPKASMKHYRKIIDSNGFPGPETLERFCPEEFTVCTECSFFHTRKS

SEQ ID NO: 13 - protein, 953 aa, Homo sapiens
RRLRAEPGDGAQTWARFSRPPAPEAAGLFQGTFPDGFLWAVGSAAYQTEGGWQQHGKGASIWDTFTHHPLAPPGDSRNASLPLGAPSPLQPATGDVASDSYNNVFRDTEALRELGVTHYRFSISWARVLPNGSAGVPNREGLRYYRRLLERLRELGVQPVVTLYHWDLPQRLQDAYGGWANRALADHFRDYAELCFRHFGGQVKYWITIDNPYVVAWHGYATGRLAPGIRGSPRLGYLVAHNLLLAHAKVWHLYNTSFRPTQGGQVSIALSSHWINPRRMTDHSIKECQKSLDFVLGWFAKPVFIDGDYPESMKNNLSSILPDFTESEKKFIKGTADFFALSFGPTLSFQLLDPHMKFRQLESPNLRQLLSWIDLEFNHPQIFIVENGWFVSGTTKRDDAKYMYYLKKFIMETLKAIKLDGVDVIGYTAWSLMDGFEWHRGYSIRRGLFYVDFLSQDKMLLPKSSALFYQKLIEKNGFPPLPENQPLEGTFPCDFAWGVVDNYIQVDTTLSQFTDLNVYLWDVHHSKRLIKVDGVVTKKRKSYCVDFAAIQPQIALLQEMHVTHFRFSLDWALILPLGNQSQVNHTILQYYRCMASELVRVNITPVVALWQPMAPNQGLPRLLARQGAWENPYTALAFAEYARLCFQELGHHVKLWITMNEPYTRNMTYSAGHNLLKAHALAWHVYNEKFRHAQNGKISIALQADWIEPACPFSQKDKEVAERVLEFDIGWLAEPIFGSGDYPWVMRDWLNQRNNFLLPYFTEDEKKLIQGTFDFLALSHYTTILVDSEKEDPIKYNDYLEVQEMTDITWLNSPSQVAVVPWGLRKVLNWLKFKYGDLPMYIISNGIDDGLHAEDDQLRVYYMQNYINEALKAHILDGINLCGYFAYSFNDRTAPRFGLYRYAADQFEPKASMKHYRKIIDSNGFPGPETLERFCPEEFTVCTECSFFHTRKS

SEQ ID NO: 14 - protein, 948 aa, Homo sapiens
EPGDGAQTWARFSRPPAPEAAGLFQGTFPDGFLWAVGSAAYQTEGGWQQHGKGASIWDTFTHHPLAPPGDSRNASLPLGAPSPLQPATGDVASDSYNNVFRDTEALRELGVTHYRFSISWARVLPNGSAGVPNREGLRYYRRLLERLRELGVQPVVTLYHWDLPQRLQDAYGGWANRALADHFRDYAELCFRHFGGQVKYWITIDNPYVVAWHGYATGRLAPGIRGSPRLGYLVAHNLLLAHAKVWHLYNTSFRPTQGGQVSIALSSHWINPRRMTDHSIKECQKSLDFVLGWFAKPVFIDGDYPESMKNNLSSILPDFTESEKKFIKGTADFFALSFGPTLSFQLLDPHMKFRQLESPNLRQLLSWIDLEFNHPQIFIVENGWFVSGTTKRDDAKYMYYLKKFIMETLKAIKLDGVDVIGYTAWSLMDGFEWHRGYSIRRGLFYVDFLSQDKMLLPKSSALFYQKLIEKNGFPPLPENQPLEGTFPCDFAWGVVDNYIQVDTTLSQFTDLNVYLWDVHHSKRLIKVDGVVTKKRKSYCVDFAAIQPQIALLQEMHVTHFRFSLDWALILPLGNQSQVNHTILQYYRCMASELVRVNITPVVALWQPMAPNQGLPRLLARQGAWENPYTALAFAEYARLCFQELGHHVKLWITMNEPYTRNMTYSAGHNLLKAHALAWHVYNEKFRHAQNGKISIALQADWIEPACPFSQKDKEVAERVLEFDIGWLAEPIFGSGDYPWVMRDWLNQRNNFLLPYFTEDEKKLIQGTFDFLALSHYTTILVDSEKEDPIKYNDYLEVQEMTDITWLNSPSQVAVVPWGLRKVLNWLKFKYGDLPMYIISNGIDDGLHAEDDQLRVYYMQNYINEALKAHILDGINLCGYFAYSFNDRTAPRFGLYRYAADQFEPKASMKHYRKIIDSNGFPGPETLERFCPEEFTVCTECSFFHTRKS

SEQ ID NO: 15 - protein, 946 aa, Homo sapiens
GDGAQTWARFSRPPAPEAAGLFQGTFPDGFLWAVGSAAYQTEGGWQQHGKGASIWDTFTHHPLAPPGDSRNASLPLGAPSPLQPATGDVASDSYNNVFRDTEALRELGVTHYRFSISWARVLPNGSAGVPNREGLRYYRRLLERLRELGVQPVVTLYHWDLPQRLQDAYGGWANRALADHFRDYAELCFRHFGGQVKYWITIDNPYVVAWHGYATGRLAPGIRGSPRLGYLVAHNLLLAHAKVWHLYNTSFRPTQGGQVSIALSSHWINPRRMTDHSIKECQKSLDFVLGWFAKPVFIDGDYPESMKNNLSSILPDFTESEKKFIKGTADFFALSFGPTLSFQLLDPHMKFRQLESPNLRQLLSWIDLEFNHPQIFIVENGWFVSGTTKRDDAKYMYYLKKFIMETLKAIKLDGVDVIGYTAWSLMDGFEWHRGYSIRRGLFYVDFLSQDKMLLPKSSALFYQKLIEKNGFPPLPENQPLEGTFPCDFAWGVVDNYIQVDTTLSQFTDLNVYLWDVHHSKRLIKVDGVVTKKRKSYCVDFAAIQPQIALLQEMHVTHFRFSLDWALILPLGNQSQVNHTILQYYRCMASELVRVNITPVVALWQPMAPNQGLPRLLARQGAWENPYTALAFAEYARLCFQELGHHVKLWITMNEPYTRNMTYSAGHNLLKAHALAWHVYNEKFRHAQNGKISIALQADWIEPACPFSQKDKEVAERVLEFDIGWLAEPIFGSGDYPWVMRDWLNQRNNFLLPYFTEDEKKLIQGTFDFLALSHYTTILVDSEKEDPIKYNDYLEVQEMTDITWLNSPSQVAVVPWGLRKVLNWLKFKYGDLPMYIISNGIDDGLHAEDDQLRVYYMQNYINEALKAHILDGINLCGYFAYSFNDRTAPRFGLYRYAADQFEPKASMKHYRKIIDSNGFPGPETLERFCPEEFTVCTECSFFHTRKS

SEQ ID NO: 16 - protein, 851 aa, Homo sapiens
NVFRDTEALRELGVTHYRFSISWARVLPNGSAGVPNREGLRYYRRLLERLRELGVQPVVTLYHWDLPQRLQDAYGGWANRALADHFRDYAELCFRHFGGQVKYWITIDNPYVVAWHGYATGRLAPGIRGSPRLGYLVAHNLLLAHAKVWHLYNTSFRPTQGGQVSIALSSHWINPRRMTDHSIKECQKSLDFVLGWFAKPVFIDGDYPESMKNNLSSILPDFTESEKKFIKGTADFFALSFGPTLSFQLLDPHMKFRQLESPNLRQLLSWIDLEFNHPQIFIVENGWFVSGTTKRDDAKYMYYLKKFIMETLKAIKLDGVDVIGYTAWSLMDGFEWHRGYSIRRGLFYVDFLSQDKMLLPKSSALFYQKLIEKNGFPPLPENQPLEGTFPCDFAWGVVDNYIQVDTTLSQFTDLNVYLWDVHHSKRLIKVDGVVTKKRKSYCVDFAAIQPQIALLQEMHVTHFRFSLDWALILPLGNQSQVNHTILQYYRCMASELVRVNITPVVALWQPMAPNQGLPRLLARQGAWENPYTALAFAEYARLCFQELGHHVKLWITMNEPYTRNMTYSAGHNLLKAHALAWHVYNEKFRHAQNGKISIALQADWIEPACPFSQKDKEVAERVLEFDIGWLAEPIFGSGDYPWVMRDWLNQRNNFLLPYFTEDEKKLIQGTFDFLALSHYTTILVDSEKEDPIKYNDYLEVQEMTDITWLNSPSQVAVVPWGLRKVLNWLKFKYGDLPMYIISNGIDDGLHAEDDQLRVYYMQNYINEALKAHILDGINLCGYFAYSFNDRTAPRFGLYRYAADQFEPKASMKHYRKIIDSNGFPGPETLERFCPEEFTVCTECSFFHTRKS

SEQ ID NO: 17 - protein, 549 aa, Homo sapiens
MPASAPPRRPRPPPPSLSLLLVLLGLGGRRLRAEPGDGAQTWARFSRPPAPEAAGLFQGTFPDGFLWAVGSAAYQTEGGWQQHGKGASIWDTFTHHPLAPPGDSRNASLPLGAPSPLQPATGDVASDSYNNVFRDTEALRELGVTHYRFSISWARVLPNGSAGVPNREGLRYYRRLLERLRELGVQPVVTLYHWDLPQRLQDAYGGWANRALADHFRDYAELCFRHFGGQVKYWITIDNPYVVAWHGYATGRLAPGIRGSPRLGYLVAHNLLLAHAKVWHLYNTSFRPTQGGQVSIALSSHWINPRRMTDHSIKECQKSLDFVLGWFAKPVFIDGDYPESMKNNLSSILPDFTESEKKFIKGTADFFALSFGPTLSFQLLDPHMKFRQLESPNLRQLLSWIDLEFNHPQIFIVENGWFVSGTTKRDDAKYMYYLKKFIMETLKAIKLDGVDVIGYTAWSLMDGFEWHRGYSIRRGLFYVDFLSQDKMLLPKSSALFYQKLIEKNGFPPLPENQPLEGTFPCDFAWGVVDNYIQVDTTLSQFTDLNVYLW

SEQ ID NO: 18 - protein, 521 aa, Homo sapiens
RRLRAEPGDGAQTWARFSRPPAPEAAGLFQGTFPDGFLWAVGSAAYQTEGGWQQHGKGASIWDTFTHHPLAPPGDSRNASLPLGAPSPLQPATGDVASDSYNNVFRDTEALRELGVTHYRFSISWARVLPNGSAGVPNREGLRYYRRLLERLRELGVQPVVTLYHWDLPQRLQDAYGGWANRALADHFRDYAELCFRHFGGQVKYWITIDNPYVVAWHGYATGRLAPGIRGSPRLGYLVAHNLLLAHAKVWHLYNTSFRPTQGGQVSIALSSHWINPRRMTDHSIKECQKSLDFVLGWFAKPVFIDGDYPESMKNNLSSILPDFTESEKKFIKGTADFFALSFGPTLSFQLLDPHMKFRQLESPNLRQLLSWIDLEFNHPQIFIVENGWFVSGTTKRDDAKYMYYLKKFIMETLKAIKLDGVDVIGYTAWSLMDGFEWHRGYSIRRGLFYVDFLSQDKMLLPKSSALFYQKLIEKNGFPPLPENQPLEGTFPCDFAWGVVDNYIQVDTTLSQFTDLNVYLW

SEQ ID NO: 19 - protein, 516 aa, Homo sapiens
EPGDGAQTWARFSRPPAPEAAGLFQGTFPDGFLWAVGSAAYQTEGGWQQHGKGASIWDTFTHHPLAPPGDSRNASLPLGAPSPLQPATGDVASDSYNNVFRDTEALRELGVTHYRFSISWARVLPNGSAGVPNREGLRYYRRLLERLRELGVQPVVTLYHWDLPQRLQDAYGGWANRALADHFRDYAELCFRHFGGQVKYWITIDNPYVVAWHGYATGRLAPGIRGSPRLGYLVAHNLLLAHAKVWHLYNTSFRPTQGGQVSIALSSHWINPRRMTDHSIKECQKSLDFVLGWFAKPVFIDGDYPESMKNNLSSILPDFTESEKKFIKGTADFFALSFGPTLSFQLLDPHMKFRQLESPNLRQLLSWIDLEFNHPQIFIVENGWFVSGTTKRDDAKYMYYLKKFIMETLKAIKLDGVDVIGYTAWSLMDGFEWHRGYSIRRGLFYVDFLSQDKMLLPKSSALFYQKLIEKNGFPPLPENQPLEGTFPCDFAWGVVDNYIQVDTTLSQFTDLNVYLW

SEQ ID NO: 20 - protein, 514 aa, Homo sapiens
GDGAQTWARFSRPPAPEAAGLFQGTFPDGFLWAVGSAAYQTEGGWQQHGKGASIWDTFTHHPLAPPGDSRNASLPLGAPSPLQPATGDVASDSYNNVFRDTEALRELGVTHYRFSISWARVLPNGSAGVPNREGLRYYRRLLERLRELGVQPVVTLYHWDLPQRLQDAYGGWANRALADHFRDYAELCFRHFGGQVKYWITIDNPYVVAWHGYATGRLAPGIRGSPRLGYLVAHNLLLAHAKVWHLYNTSFRPTQGGQVSIALSSHWINPRRMTDHSIKECQKSLDFVLGWFAKPVFIDGDYPESMKNNLSSILPDFTESEKKFIKGTADFFALSFGPTLSFQLLDPHMKFRQLESPNLRQLLSWIDLEFNHPQIFIVENGWFVSGTTKRDDAKYMYYLKKFIMETLKAIKLDGVDVIGYTAWSLMDGFEWHRGYSIRRGLFYVDFLSQDKMLLPKSSALFYQKLIEKNGFPPLPENQPLEGTFPCDFAWGVVDNYIQVDTTLSQFTDLNVYLW

SEQ ID NO: 21 - protein, 419 aa, Homo sapiens
NVFRDTEALRELGVTHYRFSISWARVLPNGSAGVPNREGLRYYRRLLERLRELGVQPVVTLYHWDLPQRLQDAYGGWANRALADHFRDYAELCFRHFGGQVKYWITIDNPYVVAWHGYATGRLAPGIRGSPRLGYLVAHNLLLAHAKVWHLYNTSFRPTQGGQVSIALSSHWINPRRMTDHSIKECQKSLDFVLGWFAKPVFIDGDYPESMKNNLSSILPDFTESEKKFIKGTADFFALSFGPTLSFQLLDPHMKFRQLESPNLRQLLSWIDLEFNHPQIFIVENGWFVSGTTKRDDAKYMYYLKKFIMETLKAIKLDGVDVIGYTAWSLMDGFEWHRGYSIRRGLFYVDFLSQDKMLLPKSSALFYQKLIEKNGFPPLPENQPLEGTFPCDFAWGVVDNYIQVDTTLSQFTDLNVYLW

SEQ ID NO: 22 - protein, 1012 aa, Homo sapiens [sequence omitted]

SEQ ID NO: 23 - protein, 981 aa, Homo sapiens
MPASAPPRRPRPPPPSLSLLLVLLGLGGRRLRAEPGDGAQTWARVSRPPAPEAAGLFQGTFPDGFLWAVGSAAYQTEGGWQQHGKGASIWDTFTHHPLAPPGDSRNASLPLGAPSPLQPATGDVASDSYNNVFRDTEALRELGVTHYRFSISWARVLPNGSAGVPNREGLRYYRRLLERLRELGVQPVVTLYHWDLPQRLQDAYGGWANRALADHFRDYAELCFRHFGGQVKYWITIDNPYVVAWHGYATGRLAPGIRGSPRLGYLVAHNLLLAHAKVWHLYNTSFRPTQGGQVSIALSSHWINPRRMTDHSIKECQKSLDFVLGWFAKPVFIDGDYPESMKNNLSSILPDFTESEKKFIKGTADFFALCFGPTLSFQLLDPHMKFRQLESPNLRQLLSWIDLEFNHPQIFIVENGWFVSGTTKRDDAKYMYYLKKFIMETLKAIKLDGVDVIGYTAWSLMDGFEWHRGYSIRRGLFYVDFLSQDKMLLPKSSALFYQKLIEKNGFPPLPENQPLEGTFPCDFAWGVVDNYIQVDTTLSQFTDLNVYLWDVHHSKRLIKVDGVVTKKRKSYCVDFAAIQPQIALLQEMHVTHFRFSLDWALILPLGNQSQVNHTILQYYRCMASELVRVNITPVVALWQPMAPNQGLPRLLARQGAWENPYTALAFAEYARLCFQELGHHVKLWITMNEPYTRNMTYSAGHNLLKAHALAWHVYNEKFRHAQNGKISIALQADWIEPACPFSQKDKEVAERVLEFDIGWLAEPIFGSGDYPWVMRDWLNQRNNFLLPYFTEDEKKLIQGTFDFLALSHYTTILVDSEKEDPIKYNDYLEVQEMTDITWLNSPSQVAVVPWGLRKVLNWLKFKYGDLPMYIISNGIDDGLHAEDDQLRVYYMQNYINEALKAHILDGINLCGYFAYSFNDRTAPRFGLYRYAADQFEPKASMKHYRKIIDSNGFPGPETLERFCPEEFTVCTECSFFHTRKS

SEQ ID NO: 24 - protein, 953 aa, Homo sapiens
RRLRAEPGDGAQTWARVSRPPAPEAAGLFQGTFPDGFLWAVGSAAYQTEGGWQQHGKGASIWDTFTHHPLAPPGDSRNASLPLGAPSPLQPATGDVASDSYNNVFRDTEALRELGVTHYRFSISWARVLPNGSAGVPNREGLRYYRRLLERLRELGVQPVVTLYHWDLPQRLQDAYGGWANRALADHFRDYAELCFRHFGGQVKYWITIDNPYVVAWHGYATGRLAPGIRGSPRLGYLVAHNLLLAHAKVWHLYNTSFRPTQGGQVSIALSSHWINPRRMTDHSIKECQKSLDFVLGWFAKPVFIDGDYPESMKNNLSSILPDFTESEKKFIKGTADFFALCFGPTLSFQLLDPHMKFRQLESPNLRQLLSWIDLEFNHPQIFIVENGWFVSGTTKRDDAKYMYYLKKFIMETLKAIKLDGVDVIGYTAWSLMDGFEWHRGYSIRRGLFYVDFLSQDKMLLPKSSALFYQKLIEKNGFPPLPENQPLEGTFPCDFAWGVVDNYIQVDTTLSQFTDLNVYLWDVHHSKRLIKVDGVVTKKRKSYCVDFAAIQPQIALLQEMHVTHFRFSLDWALILPLGNQSQVNHTILQYYRCMASELVRVNITPVVALWQPMAPNQGLPRLLARQGAWENPYTALAFAEYARLCFQELGHHVKLWITMNEPYTRNMTYSAGHNLLKAHALAWHVYNEKFRHAQNGKISIALQADWIEPACPFSQKDKEVAERVLEFDIGWLAEPIFGSGDYPWVMRDWLNQRNNFLLPYFTEDEKKLIQGTFDFLALSHYTTILVDSEKEDPIKYNDYLEVQEMTDITWLNSPSQVAVVPWGLRKVLNWLKFKYGDLPMYIISNGIDDGLHAEDDQLRVYYMQNYINEALKAHILDGINLCGYFAYSFNDRTAPRFGLYRYAADQFEPKASMKHYRKIIDSNGFPGPETLERFCPEEFTVCTECSFFHTRKS

SEQ ID NO: 25 - protein, 948 aa, Homo sapiens
EPGDGAQTWARVSRPPAPEAAGLFQGTFPDGFLWAVGSAAYQTEGGWQQHGKGASIWDTFTHHPLAPPGDSRNASLPLGAPSPLQPATGDVASDSYNNVFRDTEALRELGVTHYRFSISWARVLPNGSAGVPNREGLRYYRRLLERLRELGVQPVVTLYHWDLPQRLQDAYGGWANRALADHFRDYAELCFRHFGGQVKYWITIDNPYVVAWHGYATGRLAPGIRGSPRLGYLVAHNLLLAHAKVWHLYNTSFRPTQGGQVSIALSSHWINPRRMTDHSIKECQKSLDFVLGWFAKPVFIDGDYPESMKNNLSSILPDFTESEKKFIKGTADFFALCFGPTLSFQLLDPHMKFRQLESPNLRQLLSWIDLEFNHPQIFIVENGWFVSGTTKRDDAKYMYYLKKFIMETLKAIKLDGVDVIGYTAWSLMDGFEWHRGYSIRRGLFYVDFLSQDKMLLPKSSALFYQKLIEKNGFPPLPENQPLEGTFPCDFAWGVVDNYIQVDTTLSQFTDLNVYLWDVHHSKRLIKVDGVVTKKRKSYCVDFAAIQPQIALLQEMHVTHFRFSLDWALILPLGNQSQVNHTILQYYRCMASELVRVNITPVVALWQPMAPNQGLPRLLARQGAWENPYTALAFAEYARLCFQELGHHVKLWITMNEPYTRNMTYSAGHNLLKAHALAWHVYNEKFRHAQNGKISIALQADWIEPACPFSQKDKEVAERVLEFDIGWLAEPIFGSGDYPWVMRDWLNQRNNFLLPYFTEDEKKLIQGTFDFLALSHYTTILVDSEKEDPIKYNDYLEVQEMTDITWLNSPSQVAVVPWGLRKVLNWLKFKYGDLPMYIISNGIDDGLHAEDDQLRVYYMQNYINEALKAHILDGINLCGYFAYSFNDRTAPRFGLYRYAADQFEPKASMKHYRKIIDSNGFPGPETLERFCPEEFTVCTECSFFHTRKS

SEQ ID NO: 26 - protein, 946 aa, Homo sapiens
GDGAQTWARVSRPPAPEAAGLFQGTFPDGFLWAVGSAAYQTEGGWQQHGKGASIWDTFTHHPLAPPGDSRNASLPLGAPSPLQPATGDVASDSYNNVFRDTEALRELGVTHYRFSISWARVLPNGSAGVPNREGLRYYRRLLERLRELGVQPVVTLYHWDLPQRLQDAYGGWANRALADHFRDYAELCFRHFGGQVKYWITIDNPYVVAWHGYATGRLAPGIRGSPRLGYLVAHNLLLAHAKVWHLYNTSFRPTQGGQVSIALSSHWINPRRMTDHSIKECQKSLDFVLGWFAKPVFIDGDYPESMKNNLSSILPDFTESEKKFIKGTADFFALCFGPTLSFQLLDPHMKFRQLESPNLRQLLSWIDLEFNHPQIFIVENGWFVSGTTKRDDAKYMYYLKKFIMETLKAIKLDGVDVIGYTAWSLMDGFEWHRGYSIRRGLFYVDFLSQDKMLLPKSSALFYQKLIEKNGFPPLPENQPLEGTFPCDFAWGVVDNYIQVDTTLSQFTDLNVYLWDVHHSKRLIKVDGVVTKKRKSYCVDFAAIQPQIALLQEMHVTHFRFSLDWALILPLGNQSQVNHTILQYYRCMASELVRVNITPVVALWQPMAPNQGLPRLLARQGAWENPYTALAFAEYARLCFQELGHHVKLWITMNEPYTRNMTYSAGHNLLKAHALAWHVYNEKFRHAQNGKISIALQADWIEPACPFSQKDKEVAERVLEFDIGWLAEPIFGSGDYPWVMRDWLNQRNNFLLPYFTEDEKKLIQGTFDFLALSHYTTILVDSEKEDPIKYNDYLEVQEMTDITWLNSPSQVAVVPWGLRKVLNWLKFKYGDLPMYIISNGIDDGLHAEDDQLRVYYMQNYINEALKAHILDGINLCGYFAYSFNDRTAPRFGLYRYAADQFEPKASMKHYRKIIDSNGFPGPETLERFCPEEFTVCTECSFFHTRKS

SEQ ID NO: 27 - protein, 549 aa, Homo sapiens
MPASAPPRRPRPPPPSLSLLLVLLGLGGRRLRAEPGDGAQTWARVSRPPAPEAAGLFQGTFPDGFLWAVGSAAYQTEGGWQQHGKGASIWDTFTHHPLAPPGDSRNASLPLGAPSPLQPATGDVASDSYNNVFRDTEALRELGVTHYRFSISWARVLPNGSAGVPNREGLRYYRRLLERLRELGVQPVVTLYHWDLPQRLQDAYGGWANRALADHFRDYAELCFRHFGGQVKYWITIDNPYVVAWHGYATGRLAPGIRGSPRLGYLVAHNLLLAHAKVWHLYNTSFRPTQGGQVSIALSSHWINPRRMTDHSIKECQKSLDFVLGWFAKPVFIDGDYPESMKNNLSSILPDFTESEKKFIKGTADFFALCFGPTLSFQLLDPHMKFRQLESPNLRQLLSWIDLEFNHPQIFIVENGWFVSGTTKRDDAKYMYYLKKFIMETLKAIKLDGVDVIGYTAWSLMDGFEWHRGYSIRRGLFYVDFLSQDKMLLPKSSALFYQKLIEKNGFPPLPENQPLEGTFPCDFAWGVVDNYIQVDTTLSQFTDLNVYLW

SEQ ID NO: 28 - protein, 521 aa, Homo sapiens
RRLRAEPGDGAQTWARVSRPPAPEAAGLFQGTFPDGFLWAVGSAAYQTEGGWQQHGKGASIWDTFTHHPLAPPGDSRNASLPLGAPSPLQPATGDVASDSYNNVFRDTEALRELGVTHYRFSISWARVLPNGSAGVPNREGLRYYRRLLERLRELGVQPVVTLYHWDLPQRLQDAYGGWANRALADHFRDYAELCFRHFGGQVKYWITIDNPYVVAWHGYATGRLAPGIRGSPRLGYLVAHNLLLAHAKVWHLYNTSFRPTQGGQVSIALSSHWINPRRMTDHSIKECQKSLDFVLGWFAKPVFIDGDYPESMKNNLSSILPDFTESEKKFIKGTADFFALCFGPTLSFQLLDPHMKFRQLESPNLRQLLSWIDLEFNHPQIFIVENGWFVSGTTKRDDAKYMYYLKKFIMETLKAIKLDGVDVIGYTAWSLMDGFEWHRGYSIRRGLFYVDFLSQDKMLLPKSSALFYQKLIEKNGFPPLPENQPLEGTFPCDFAWGVVDNYIQVDTTLSQFTDLNVYLW

SEQ ID NO: 29 - protein, 516 aa, Homo sapiens
EPGDGAQTWARVSRPPAPEAAGLFQGTFPDGFLWAVGSAAYQTEGGWQQHGKGASIWDTFTHHPLAPPGDSRNASLPLGAPSPLQPATGDVASDSYNNVFRDTEALRELGVTHYRFSISWARVLPNGSAGVPNREGLRYYRRLLERLRELGVQPVVTLYHWDLPQRLQDAYGGWANRALADHFRDYAELCFRHFGGQVKYWITIDNPYVVAWHGYATGRLAPGIRGSPRLGYLVAHNLLLAHAKVWHLYNTSFRPTQGGQVSIALSSHWINPRRMTDHSIKECQKSLDFVLGWFAKPVFIDGDYPESMKNNLSSILPDFTESEKKFIKGTADFFALCFGPTLSFQLLDPHMKFRQLESPNLRQLLSWIDLEFNHPQIFIVENGWFVSGTTKRDDAKYMYYLKKFIMETLKAIKLDGVDVIGYTAWSLMDGFEWHRGYSIRRGLFYVDFLSQDKMLLPKSSALFYQKLIEKNGFPPLPENQPLEGTFPCDFAWGVVDNYIQVDTTLSQFTDLNVYLW

SEQ ID NO: 30 - protein, 514 aa, Homo sapiens
GDGAQTWARVSRPPAPEAAGLFQGTFPDGFLWAVGSAAYQTEGGWQQHGKGASIWDTFTHHPLAPPGDSRNASLPLGAPSPLQPATGDVASDSYNNVFRDTEALRELGVTHYRFSISWARVLPNGSAGVPNREGLRYYRRLLERLRELGVQPVVTLYHWDLPQRLQDAYGGWANRALADHFRDYAELCFRHFGGQVKYWITIDNPYVVAWHGYATGRLAPGIRGSPRLGYLVAHNLLLAHAKVWHLYNTSFRPTQGGQVSIALSSHWINPRRMTDHSIKECQKSLDFVLGWFAKPVFIDGDYPESMKNNLSSILPDFTESEKKFIKGTADFFALCFGPTLSFQLLDPHMKFRQLESPNLRQLLSWIDLEFNHPQIFIVENGWFVSGTTKRDDAKYMYYLKKFIMETLKAIKLDGVDVIGYTAWSLMDGFEWHRGYSIRRGLFYVDFLSQDKMLLPKSSALFYQKLIEKNGFPPLPENQPLEGTFPCDFAWGVVDNYIQVDTTLSQFTDLNVYLW

SEQ ID NO: 31 - protein, 981 aa, Homo sapiens
MPASAPPRRPRPPPPSLSLLLVLLGLGGRRLRAEPGDGAQTWARVSRPPAPEAAGLFQGTFPDGFLWAVGSAAYQTEGGWQQHGKGASIWDTFTHHPLAPPGDSRNASLPLGAPSPLQPATGDVASDSYNNVFRDTEALRELGVTHYRFSISWARVLPNGSAGVPNREGLRYYRRLLERLRELGVQPVVTLYHWDLPQRLQDAYGGWANRALADHFRDYAELCFRHFGGQVKYWITIDNPYVVAWHGYATGRLAPGIRGSPRLGYLVAHNLLLAHAKVWHLYNTSFRPTQGGQVSIALSSHWINPRRMTDHSIKECQKSLDFVLGWFAKPVFIDGDYPESMKNNLSSILPDFTESEKKFIKGTADFFALSFGPTLSFQLLDPHMKFRQLESPNLRQLLSWIDLEFNHPQIFIVENGWFVSGTTKRDDAKYMYYLKKFIMETLKAIKLDGVDVIGYTAWSLMDGFEWHRGYSIRRGLFYVDFLSQDKMLLPKSSALFYQKLIEKNGFPPLPENQPLEGTFPCDFAWGVVDNYIQVDTTLSQFTDLNVYLWDVHHSKRLIKVDGVVTKKRKSYCVDFAAIQPQIALLQEMHVTHFRFSLDWALILPLGNQSQVNHTILQYYRCMASELVRVNITPVVALWQPMAPNQGLPRLLARQGAWENPYTALAFAEYARLCFQELGHHVKLWITMNEPYTRNMTYSAGHNLLKAHALAWHVYNEKFRHAQNGKISIALQADWIEPACPFSQKDKEVAERVLEFDIGWLAEPIFGSGDYPWVMRDWLNQRNNFLLPYFTEDEKKLIQGTFDFLALSHYTTILVDSEKEDPIKYNDYLEVQEMTDITWLNSPSQVAVVPWGLRKVLNWLKFKYGDLPMYIISNGIDDGLHAEDDQLRVYYMQNYINEALKAHILDGINLCGYFAYSFNDRTAPRFGLYRYAADQFEPKASMKHYRKIIDSNGFPGPETLERFCPEEFTVCTECSFFHTRKS

SEQ ID NO: 32 - protein, 953 aa, Homo sapiens
RRLRAEPGDGAQTWARVSRPPAPEAAGLFQGTFPDGFLWAVGSAAYQTEGGWQQHGKGASIWDTFTHHPLAPPGDSRNASLPLGAPSPLQPATGDVASDSYNNVFRDTEALRELGVTHYRFSISWARVLPNGSAGVPNREGLRYYRRLLERLRELGVQPVVTLYHWDLPQRLQDAYGGWANRALADHFRDYAELCFRHFGGQVKYWITIDNPYVVAWHGYATGRLAPGIRGSPRLGYLVAHNLLLAHAKVWHLYNTSFRPTQGGQVSIALSSHWINPRRMTDHSIKECQKSLDFVLGWFAKPVFIDGDYPESMKNNLSSILPDFTESEKKFIKGTADFFALSFGPTLSFQLLDPHMKFRQLESPNLRQLLSWIDLEFNHPQIFIVENGWFVSGTTKRDDAKYMYYLKKFIMETLKAIKLDGVDVIGYTAWSLMDGFEWHRGYSIRRGLFYVDFLSQDKMLLPKSSALFYQKLIEKNGFPPLPENQPLEGTFPCDFAWGVVDNYIQVDTTLSQFTDLNVYLWDVHHSKRLIKVDGVVTKKRKSYCVDFAAIQPQIALLQEMHVTHFRFSLDWALILPLGNQSQVNHTILQYYRCMASELVRVNITPVVALWQPMAPNQGLPRLLARQGAWENPYTALAFAEYARLCFQELGHHVKLWITMNEPYTRNMTYSAGHNLLKAHALAWHVYNEKFRHAQNGKISIALQADWIEPACPFSQKDKEVAERVLEFDIGWLAEPIFGSGDYPWVMRDWLNQRNNFLLPYFTEDEKKLIQGTFDFLALSHYTTILVDSEKEDPIKYNDYLEVQEMTDITWLNSPSQVAVVPWGLRKVLNWLKFKYGDLPMYIISNGIDDGLHAEDDQLRVYYMQNYINEALKAHILDGINLCGYFAYSFNDRTAPRFGLYRYAADQFEPKASMKHYRKIIDSNGFPGPETLERFCPEEFTVCTECSFFHTRKS

SEQ ID NO: 33 - protein, 948 aa, Homo sapiens
EPGDGAQTWARVSRPPAPEAAGLFQGTFPDGFLWAVGSAAYQTEGGWQQHGKGASIWDTFTHHPLAPPGDSRNASLPLGAPSPLQPATGDVASDSYNNVFRDTEALRELGVTHYRFSISWARVLPNGSAGVPNREGLRYYRRLLERLRELGVQPVVTLYHWDLPQRLQDAYGGWANRALADHFRDYAELCFRHFGGQVKYWITIDNPYVVAWHGYATGRLAPGIRGSPRLGYLVAHNLLLAHAKVWHLYNTSFRPTQGGQVSIALSSHWINPRRMTDHSIKECQKSLDFVLGWFAKPVFIDGDYPESMKNNLSSILPDFTESEKKFIKGTADFFALSFGPTLSFQLLDPHMKFRQLESPNLRQLLSWIDLEFNHPQIFIVENGWFVSGTTKRDDAKYMYYLKKFIMETLKAIKLDGVDVIGYTAWSLMDGFEWHRGYSIRRGLFYVDFLSQDKMLLPKSSALFYQKLIEKNGFPPLPENQPLEGTFPCDFAWGVVDNYIQVDTTLSQFTDLNVYLWDVHHSKRLIKVDGVVTKKRKSYCVDFAAIQPQIALLQEMHVTHFRFSLDWALILPLGNQSQVNHTILQYYRCMASELVRVNITPVVALWQPMAPNQGLPRLLARQGAWENPYTALAFAEYARLCFQELGHHVKLWITMNEPYTRNMTYSAGHNLLKAHALAWHVYNEKFRHAQNGKISIALQADWIEPACPFSQKDKEVAERVLEFDIGWLAEPIFGSGDYPWVMRDWLNQRNNFLLPYFTEDEKKLIQGTFDFLALSHYTTILVDSEKEDPIKYNDYLEVQEMTDITWLNSPSQVAVVPWGLRKVLNWLKFKYGDLPMYIISNGIDDGLHAEDDQLRVYYMQNYINEALKAHILDGINLCGYFAYSFNDRTAPRFGLYRYAADQFEPKASMKHYRKIIDSNGFPGPETLERFCPEEFTVCTECSFFHTRKS

SEQ ID NO: 34 - protein, 946 aa, Homo sapiens
GDGAQTWARVSRPPAPEAAGLFQGTFPDGFLWAVGSAAYQTEGGWQQHGKGASIWDTFTHHPLAPPGDSRNASLPLGAPSPLQPATGDVASDSYNNVFRDTEALRELGVTHYRFSISWARVLPNGSAGVPNREGLRYYRRLLERLRELGVQPVVTLYHWDLPQRLQDAYGGWANRALADHFRDYAELCFRHFGGQVKYWITIDNPYVVAWHGYATGRLAPGIRGSPRLGYLVAHNLLLAHAKVWHLYNTSFRPTQGGQVSIALSSHWINPRRMTDHSIKECQKSLDFVLGWFAKPVFIDGDYPESMKNNLSSILPDFTESEKKFIKGTADFFALSFGPTLSFQLLDPHMKFRQLESPNLRQLLSWIDLEFNHPQIFIVENGWFVSGTTKRDDAKYMYYLKKFIMETLKAIKLDGVDVIGYTAWSLMDGFEWHRGYSIRRGLFYVDFLSQDKMLLPKSSALFYQKLIEKNGFPPLPENQPLEGTFPCDFAWGVVDNYIQVDTTLSQFTDLNVYLWDVHHSKRLIKVDGVVTKKRKSYCVDFAAIQPQIALLQEMHVTHFRFSLDWALILPLGNQSQVNHTILQYYRCMASELVRVNITPVVALWQPMAPNQGLPRLLARQGAWENPYTALAFAEYARLCFQELGHHVKLWITMNEPYTRNMTYSAGHNLLKAHALAWHVYNEKFRHAQNGKISIALQADWIEPACPFSQKDKEVAERVLEFDIGWLAEPIFGSGDYPWVMRDWLNQRNNFLLPYFTEDEKKLIQGTFDFLALSHYTTILVDSEKEDPIKYNDYLEVQEMTDITWLNSPSQVAVVPWGLRKVLNWLKFKYGDLPMYIISNGIDDGLHAEDDQLRVYYMQNYINEALKAHILDGINLCGYFAYSFNDRTAPRFGLYRYAADQFEPKASMKHYRKIIDSNGFPGPETLERFCPEEFTVCTECSFFHTRKS

SEQ ID NO: 35 - protein, 549 aa, Homo sapiens
MPASAPPRRPRPPPPSLSLLLVLLGLGGRRLRAEPGDGAQTWARVSRPPAPEAAGLFQGTFPDGFLWAVGSAAYQTEGGWQQHGKGASIWDTFTHHPLAPPGDSRNASLPLGAPSPLQPATGDVASDSYNNVFRDTEALRELGVTHYRFSISWARVLPNGSAGVPNREGLRYYRRLLERLRELGVQPVVTLYHWDLPQRLQDAYGGWANRALADHFRDYAELCFRHFGGQVKYWITIDNPYVVAWHGYATGRLAPGIRGSPRLGYLVAHNLLLAHAKVWHLYNTSFRPTQGGQVSIALSSHWINPRRMTDHSIKECQKSLDFVLGWFAKPVFIDGDYPESMKNNLSSILPDFTESEKKFIKGTADFFALSFGPTLSFQLLDPHMKFRQLESPNLRQLLSWIDLEFNHPQIFIVENGWFVSGTTKRDDAKYMYYLKKFIMETLKAIKLDGVDVIGYTAWSLMDGFEWHRGYSIRRGLFYVDFLSQDKMLLPKSSALFYQKLIEKNGFPPLPENQPLEGTFPCDFAWGVVDNYIQVDTTLSQFTDLNVYLW

SEQ ID NO: 36 - protein, 521 aa, Homo sapiens
RRLRAEPGDGAQTWARVSRPPAPEAAGLFQGTFPDGFLWAVGSAAYQTEGGWQQHGKGASIWDTFTHHPLAPPGDSRNASLPLGAPSPLQPATGDVASDSYNNVFRDTEALRELGVTHYRFSISWARVLPNGSAGVPNREGLRYYRRLLERLRELGVQPVVTLYHWDLPQRLQDAYGGWANRALADHFRDYAELCFRHFGGQVKYWITIDNPYVVAWHGYATGRLAPGIRGSPRLGYLVAHNLLLAHAKVWHLYNTSFRPTQGGQVSIALSSHWINPRRMTDHSIKECQKSLDFVLGWFAKPVFIDGDYPESMKNNLSSILPDFTESEKKFIKGTADFFALSFGPTLSFQLLDPHMKFRQLESPNLRQLLSWIDLEFNHPQIFIVENGWFVSGTTKRDDAKYMYYLKKFIMETLKAIKLDGVDVIGYTAWSLMDGFEWHRGYSIRRGLFYVDFLSQDKMLLPKSSALFYQKLIEKNGFPPLPENQPLEGTFPCDFAWGVVDNYIQVDTTLSQFTDLNVYLW

SEQ ID NO: 37 - protein, 516 aa, Homo sapiens
EPGDGAQTWARVSRPPAPEAAGLFQGTFPDGFLWAVGSAAYQTEGGWQQHGKGASIWDTFTHHPLAPPGDSRNASLPLGAPSPLQPATGDVASDSYNNVFRDTEALRELGVTHYRFSISWARVLPNGSAGVPNREGLRYYRRLLERLRELGVQPVVTLYHWDLPQRLQDAYGGWANRALADHFRDYAELCFRHFGGQVKYWITIDNPYVVAWHGYATGRLAPGIRGSPRLGYLVAHNLLLAHAKVWHLYNTSFRPTQGGQVSIALSSHWINPRRMTDHSIKECQKSLDFVLGWFAKPVFIDGDYPESMKNNLSSILPDFTESEKKFIKGTADFFALSFGPTLSFQLLDPHMKFRQLESPNLRQLLSWIDLEFNHPQIFIVENGWFVSGTTKRDDAKYMYYLKKFIMETLKAIKLDGVDVIGYTAWSLMDGFEWHRGYSIRRGLFYVDFLSQDKMLLPKSSALFYQKLIEKNGFPPLPENQPLEGTFPCDFAWGVVDNYIQVDTTLSQFTDLNVYLW

SEQ ID NO: 38 - protein, 514 aa, Homo sapiens
GDGAQTWARVSRPPAPEAAGLFQGTFPDGFLWAVGSAAYQTEGGWQQHGKGASIWDTFTHHPLAPPGDSRNASLPLGAPSPLQPATGDVASDSYNNVFRDTEALRELGVTHYRFSISWARVLPNGSAGVPNREGLRYYRRLLERLRELGVQPVVTLYHWDLPQRLQDAYGGWANRALADHFRDYAELCFRHFGGQVKYWITIDNPYVVAWHGYATGRLAPGIRGSPRLGYLVAHNLLLAHAKVWHLYNTSFRPTQGGQVSIALSSHWINPRRMTDHSIKECQKSLDFVLGWFAKPVFIDGDYPESMKNNLSSILPDFTESEKKFIKGTADFFALSFGPTLSFQLLDPHMKFRQLESPNLRQLLSWIDLEFNHPQIFIVENGWFVSGTTKRDDAKYMYYLKKFIMETLKAIKLDGVDVIGYTAWSLMDGFEWHRGYSIRRGLFYVDFLSQDKMLLPKSSALFYQKLIEKNGFPPLPENQPLEGTFPCDFAWGVVDNYIQVDTTLSQFTDLNVYLW

SEQ ID NO: 39 - protein, 1218 aa, Artificial Sequence
  Protein_Native_SS_34_981V_GS_IgG1_noCH1_Fc_Fusion
MPASAPPRRPRPPPPSLSLLLVLLGLGGRRLRAEPGDGAQTWARVSRPPAPEAAGLFQGTFPDGFLWAVGSAAYQTEGGWQQHGKGASIWDTFTHHPLAPPGDSRNASLPLGAPSPLQPATGDVASDSYNNVFRDTEALRELGVTHYRFSISWARVLPNGSAGVPNREGLRYYRRLLERLRELGVQPVVTLYHWDLPQRLQDAYGGWANRALADHFRDYAELCFRHFGGQVKYWITIDNPYVVAWHGYATGRLAPGIRGSPRLGYLVAHNLLLAHAKVWHLYNTSFRPTQGGQVSIALSSHWINPRRMTDHSIKECQKSLDFVLGWFAKPVFIDGDYPESMKNNLSSILPDFTESEKKFIKGTADFFALCFGPTLSFQLLDPHMKFRQLESPNLRQLLSWIDLEFNHPQIFIVENGWFVSGTTKRDDAKYMYYLKKFIMETLKAIKLDGVDVIGYTAWSLMDGFEWHRGYSIRRGLFYVDFLSQDKMLLPKSSALFYQKLIEKNGFPPLPENQPLEGTFPCDFAWGVVDNYIQVDTTLSQFTDLNVYLWDVHHSKRLIKVDGVVTKKRKSYCVDFAAIQPQIALLQEMHVTHFRFSLDWALILPLGNQSQVNHTILQYYRCMASELVRVNITPVVALWQPMAPNQGLPRLLARQGAWENPYTALAFAEYARLCFQELGHHVKLWITMNEPYTRNMTYSAGHNLLKAHALAWHVYNEKFRHAQNGKISIALQADWIEPACPFSQKDKEVAERVLEFDIGWLAEPIFGSGDYPWVMRDWLNQRNNFLLPYFTEDEKKLIQGTFDFLALSHYTTILVDSEKEDPIKYNDYLEVQEMTDITWLNSPSQVAVVPWGLRKVLNWLKFKYGDLPMYIISNGIDDGLHAEDDQLRVYYMQNYINEALKAHILDGINLCGYFAYSFNDRTAPRFGLYRYAADQFEPKASMKHYRKIIDSNGFPGPETLERFCPEEFTVCTECSFFHTRKSGGGGSGGGGSDKTHTCPPCPAPELLGGPSVFLFPPKPKDTLMISRTPEVTCVVVDVSHEDPEVKFNWYVDGVEVHNAKTKPREEQYNSTYRVVSVLTVLHQDWLNGKEYKCKVSNKALPAPIEKTISKAKGQPREPQVYTLPPSRDELTKNQVSLTCLVKGFYPSDIAVEWESNGQPENNYKTTPPVLDSDGSFFLYSKLTVDKSRWQQGNVFSCSVMHEALHNHYTQKSLSLSPGK

SEQ ID NO: 40 - protein, 1185 aa, Artificial Sequence
  Protein_34_981V_GS_IgG1_noCH1_Fc_Fusion
EPGDGAQTWARVSRPPAPEAAGLFQGTFPDGFLWAVGSAAYQTEGGWQQHGKGASIWDTFTHHPLAPPGDSRNASLPLGAPSPLQPATGDVASDSYNNVFRDTEALRELGVTHYRFSISWARVLPNGSAGVPNREGLRYYRRLLERLRELGVQPVVTLYHWDLPQRLQDAYGGWANRALADHFRDYAELCFRHFGGQVKYWITIDNPYVVAWHGYATGRLAPGIRGSPRLGYLVAHNLLLAHAKVWHLYNTSFRPTQGGQVSIALSSHWINPRRMTDHSIKECQKSLDFVLGWFAKPVFIDGDYPESMKNNLSSILPDFTESEKKFIKGTADFFALCFGPTLSFQLLDPHMKFRQLESPNLRQLLSWIDLEFNHPQIFIVENGWFVSGTTKRDDAKYMYYLKKFIMETLKAIKLDGVDVIGYTAWSLMDGFEWHRGYSIRRGLFYVDFLSQDKMLLPKSSALFYQKLIEKNGFPPLPENQPLEGTFPCDFAWGVVDNYIQVDTTLSQFTDLNVYLWDVHHSKRLIKVDGVVTKKRKSYCVDFAAIQPQIALLQEMHVTHFRFSLDWALILPLGNQSQVNHTILQYYRCMASELVRVNITPVVALWQPMAPNQGLPRLLARQGAWENPYTALAFAEYARLCFQELGHHVKLWITMNEPYTRNMTYSAGHNLLKAHALAWHVYNEKFRHAQNGKISIALQADWIEPACPFSQKDKEVAERVLEFDIGWLAEPIFGSGDYPWVMRDWLNQRNNFLLPYFTEDEKKLIQGTFDFLALSHYTTILVDSEKEDPIKYNDYLEVQEMTDITWLNSPSQVAVVPWGLRKVLNWLKFKYGDLPMYIISNGIDDGLHAEDDQLRVYYMQNYINEALKAHILDGINLCGYFAYSFNDRTAPRFGLYRYAADQFEPKASMKHYRKIIDSNGFPGPETLERFCPEEFTVCTECSFFHTRKSGGGGSGGGGSDKTHTCPPCPAPELLGGPSVFLFPPKPKDTLMISRTPEVTCVVVDVSHEDPEVKFNWYVDGVEVHNAKTKPREEQYNSTYRVVSVLTVLHQDWLNGKEYKCKVSNKALPAPIEKTISKAKGQPREPQVYTLPPSRDELTKNQVSLTCLVKGFYPSDIAVEWESNGQPENNYKTTPPVLDSDGSFFLYSKLTVDKSRWQQGNVFSCSVMHEALHNHYTQKSLSLSPGK

SEQ ID NO: 41 - protein, 786 aa, Artificial Sequence
  Protein_Native_SS_34_549V_GS_IgG1_noCH1_Fc_Fusion
MPASAPPRRPRPPPPSLSLLLVLLGLGGRRLRAEPGDGAQTWARVSRPPAPEAAGLFQGTFPDGFLWAVGSAAYQTEGGWQQHGKGASIWDTFTHHPLAPPGDSRNASLPLGAPSPLQPATGDVASDSYNNVFRDTEALRELGVTHYRFSISWARVLPNGSAGVPNREGLRYYRRLLERLRELGVQPVVTLYHWDLPQRLQDAYGGWANRALADHFRDYAELCFRHFGGQVKYWITIDNPYVVAWHGYATGRLAPGIRGSPRLGYLVAHNLLLAHAKVWHLYNTSFRPTQGGQVSIALSSHWINPRRMTDHSIKECQKSLDFVLGWFAKPVFIDGDYPESMKNNLSSILPDFTESEKKFIKGTADFFALCFGPTLSFQLLDPHMKFRQLESPNLRQLLSWIDLEFNHPQIFIVENGWFVSGTTKRDDAKYMYYLKKFIMETLKAIKLDGVDVIGYTAWSLMDGFEWHRGYSIRRGLFYVDFLSQDKMLLPKSSALFYQKLIEKNGFPPLPENQPLEGTFPCDFAWGVVDNYIQVSQLTKPISSLTKPYHGGGGSGGGGSDKTHTCPPCPAPELLGGPSVFLFPPKPKDTLMISRTPEVTCVVVDVSHEDPEVKFNWYVDGVEVHNAKTKPREEQYNSTYRVVSVLTVLHQDWLNGKEYKCKVSNKALPAPIEKTISKAKGQPREPQVYTLPPSRDELTKNQVSLTCLVKGFYPSDIAVEWESNGQPENNYKTTPPVLDSDGSFFLYSKLTVDKSRWQQGNVFSCSVMHEALHNHYTQKSLSLSPGK

SEQ ID NO: 42 - protein, 753 aa, Artificial Sequence
  Protein_34_549V_GS_IgG1_noCH1_Fc_Fusion
EPGDGAQTWARVSRPPAPEAAGLFQGTFPDGFLWAVGSAAYQTEGGWQQHGKGASIWDTFTHHPLAPPGDSRNASLPLGAPSPLQPATGDVASDSYNNVFRDTEALRELGVTHYRFSISWARVLPNGSAGVPNREGLRYYRRLLERLRELGVQPVVTLYHWDLPQRLQDAYGGWANRALADHFRDYAELCFRHFGGQVKYWITIDNPYVVAWHGYATGRLAPGIRGSPRLGYLVAHNLLLAHAKVWHLYNTSFRPTQGGQVSIALSSHWINPRRMTDHSIKECQKSLDFVLGWFAKPVFIDGDYPESMKNNLSSILPDFTESEKKFIKGTADFFALCFGPTLSFQLLDPHMKFRQLESPNLRQLLSWIDLEFNHPQIFIVENGWFVSGTTKRDDAKYMYYLKKFIMETLKAIKLDGVDVIGYTAWSLMDGFEWHRGYSIRRGLFYVDFLSQDKMLLPKSSALFYQKLIEKNGFPPLPENQPLEGTFPCDFAWGVVDNYIQVSQLTKPISSLTKPYHGGGGSGGGGSDKTHTCPPCPAPELLGGPSVFLFPPKPKDTLMISRTPEVTCVVVDVSHEDPEVKFNWYVDGVEVHNAKTKPREEQYNSTYRVVSVLTVLHQDWLNGKEYKCKVSNKALPAPIEKTISKAKGQPREPQVYTLPPSRDELTKNQVSLTCLVKGFYPSDIAVEWESNGQPENNYKTTPPVLDSDGSFFLYSKLTVDKSRWQQGNVFSCSVMHEALHNHYTQKSLSLSPGK

SEQ ID NO: 43 - protein, 1218 aa, Artificial Sequence
  Protein_Native_SS_34_981V_C370S_GS_IgG1_noCH1_Fc_Fusion
MPASAPPRRPRPPPPSLSLLLVLLGLGGRRLRAEPGDGAQTWARVSRPPAPEAAGLFQGTFPDGFLWAVGSAAYQTEGGWQQHGKGASIWDTFTHHPLAPPGDSRNASLPLGAPSPLQPATGDVASDSYNNVFRDTEALRELGVTHYRFSISWARVLPNGSAGVPNREGLRYYRRLLERLRELGVQPVVTLYHWDLPQRLQDAYGGWANRALADHFRDYAELCFRHFGGQVKYWITIDNPYVVAWHGYATGRLAPGIRGSPRLGYLVAHNLLLAHAKVWHLYNTSFRPTQGGQVSIALSSHWINPRRMTDHSIKECQKSLDFVLGWFAKPVFIDGDYPESMKNNLSSILPDFTESEKKFIKGTADFFALSFGPTLSFQLLDPHMKFRQLESPNLRQLLSWIDLEFNHPQIFIVENGWFVSGTTKRDDAKYMYYLKKFIMETLKAIKLDGVDVIGYTAWSLMDGFEWHRGYSIRRGLFYVDFLSQDKMLLPKSSALFYQKLIEKNGFPPLPENQPLEGTFPCDFAWGVVDNYIQVDTTLSQFTDLNVYLWDVHHSKRLIKVDGVVTKKRKSYCVDFAAIQPQIALLQEMHVTHFRFSLDWALILPLGNQSQVNHTILQYYRCMASELVRVNITPVVALWQPMAPNQGLPRLLARQGAWENPYTALAFAEYARLCFQELGHHVKLWITMNEPYTRNMTYSAGHNLLKAHALAWHVYNEKFRHAQNGKISIALQADWIEPACPFSQKDKEVAERVLEFDIGWLAEPIFGSGDYPWVMRDWLNQRNNFLLPYFTEDEKKLIQGTFDFLALSHYTTILVDSEKEDPIKYNDYLEVQEMTDITWLNSPSQVAVVPWGLRKVLNWLKFKYGDLPMYIISNGIDDGLHAEDDQLRVYYMQNYINEALKAHILDGINLCGYFAYSFNDRTAPRFGLYRYAADQFEPKASMKHYRKIIDSNGFPGPETLERFCPEEFTVCTECSFFHTRKSGGGGSGGGGSDKTHTCPPCPAPELLGGPSVFLFPPKPKDTLMISRTPEVTCVVVDVSHEDPEVKFNWYVDGVEVHNAKTKPREEQYNSTYRVVSVLTVLHQDWLNGKEYKCKVSNKALPAPIEKTISKAKGQPREPQVYTLPPSRDELTKNQVSLTCLVKGFYPSDIAVEWESNGQPENNYKTTPPVLDSDGSFFLYSKLTVDKSRWQQGNVFSCSVMHEALHNHYTQKSLSLSPGK

SEQ ID NO: 44 - protein, 1185 aa, Artificial Sequence
  Protein_34_981V_C370S_GS_IgG1_noCH1_Fc_Fusion
EPGDGAQTWARVSRPPAPEAAGLFQGTFPDGFLWAVGSAAYQTEGGWQQHGKGASIWDTFTHHPLAPPGDSRNASLPLGAPSPLQPATGDVASDSYNNVFRDTEALRELGVTHYRFSISWARVLPNGSAGVPNREGLRYYRRLLERLRELGVQPVVTLYHWDLPQRLQDAYGGWANRALADHFRDYAELCFRHFGGQVKYWITIDNPYVVAWHGYATGRLAPGIRGSPRLGYLVAHNLLLAHAKVWHLYNTSFRPTQGGQVSIALSSHWINPRRMTDHSIKECQKSLDFVLGWFAKPVFIDGDYPESMKNNLSSILPDFTESEKKFIKGTADFFALSFGPTLSFQLLDPHMKFRQLESPNLRQLLSWIDLEFNHPQIFIVENGWFVSGTTKRDDAKYMYYLKKFIMETLKAIKLDGVDVIGYTAWSLMDGFEWHRGYSIRRGLFYVDFLSQDKMLLPKSSALFYQKLIEKNGFPPLPENQPLEGTFPCDFAWGVVDNYIQVDTTLSQFTDLNVYLWDVHHSKRLIKVDGVVTKKRKSYCVDFAAIQPQIALLQEMHVTHFRFSLDWALILPLGNQSQVNHTILQYYRCMASELVRVNITPVVALWQPMAPNQGLPRLLARQGAWENPYTALAFAEYARLCFQELGHHVKLWITMNEPYTRNMTYSAGHNLLKAHALAWHVYNEKFRHAQNGKISIALQADWIEPACPFSQKDKEVAERVLEFDIGWLAEPIFGSGDYPWVMRDWLNQRNNFLLPYFTEDEKKLIQGTFDFLALSHYTTILVDSEKEDPIKYNDYLEVQEMTDITWLNSPSQVAVVPWGLRKVLNWLKFKYGDLPMYIISNGIDDGLHAEDDQLRVYYMQNYINEALKAHILDGINLCGYFAYSFNDRTAPRFGLYRYAADQFEPKASMKHYRKIIDSNGFPGPETLERFCPEEFTVCTECSFFHTRKSGGGGSGGGGSDKTHTCPPCPAPELLGGPSVFLFPPKPKDTLMISRTPEVTCVVVDVSHEDPEVKFNWYVDGVEVHNAKTKPREEQYNSTYRVVSVLTVLHQDWLNGKEYKCKVSNKALPAPIEKTISKAKGQPREPQVYTLPPSRDELTKNQVSLTCLVKGFYPSDIAVEWESNGQPENNYKTTPPVLDSDGSFFLYSKLTVDKSRWQQGNVFSCSVMHEALHNHYTQKSLSLSPGK

SEQ ID NO: 45 - protein, 786 aa, Artificial Sequence
  Protein_Native_SS_34_549V_C370S_GS_IgG1_noCH1_Fc_Fusion
MPASAPPRRPRPPPPSLSLLLVLLGLGGRRLRAEPGDGAQTWARVSRPPAPEAAGLFQGTFPDGFLWAVGSAAYQTEGGWQQHGKGASIWDTFTHHPLAPPGDSRNASLPLGAPSPLQPATGDVASDSYNNVFRDTEALRELGVTHYRFSISWARVLPNGSAGVPNREGLRYYRRLLERLRELGVQPVVTLYHWDLPQRLQDAYGGWANRALADHFRDYAELCFRHFGGQVKYWITIDNPYVVAWHGYATGRLAPGIRGSPRLGYLVAHNLLLAHAKVWHLYNTSFRPTQGGQVSIALSSHWINPRRMTDHSIKECQKSLDFVLGWFAKPVFIDGDYPESMKNNLSSILPDFTESEKKFIKGTADFFALSFGPTLSFQLLDPHMKFRQLESPNLRQLLSWIDLEFNHPQIFIVENGWFVSGTTKRDDAKYMYYLKKFIMETLKAIKLDGVDVIGYTAWSLMDGFEWHRGYSIRRGLFYVDFLSQDKMLLPKSSALFYQKLIEKNGFPPLPENQPLEGTFPCDFAWGVVDNYIQVSQLTKPISSLTKPYHGGGGSGGGGSDKTHTCPPCPAPELLGGPSVFLFPPKPKDTLMISRTPEVTCVVVDVSHEDPEVKFNWYVDGVEVHNAKTKPREEQYNSTYRVVSVLTVLHQDWLNGKEYKCKVSNKALPAPIEKTISKAKGQPREPQVYTLPPSRDELTKNQVSLTCLVKGFYPSDIAVEWESNGQPENNYKTTPPVLDSDGSFFLYSKLTVDKSRWQQGNVFSCSVMHEALHNHYTQKSLSLSPGK

SEQ ID NO: 46 - protein, 753 aa, Artificial Sequence
  Protein_34_549V_C370S_GS_IgG1_noCH1_Fc_Fusion
EPGDGAQTWARVSRPPAPEAAGLFQGTFPDGFLWAVGSAAYQTEGGWQQHGKGASIWDTFTHHPLAPPGDSRNASLPLGAPSPLQPATGDVASDSYNNVFRDTEALRELGVTHYRFSISWARVLPNGSAGVPNREGLRYYRRLLERLRELGVQPVVTLYHWDLPQRLQDAYGGWANRALADHFRDYAELCFRHFGGQVKYWITIDNPYVVAWHGYATGRLAPGIRGSPRLGYLVAHNLLLAHAKVWHLYNTSFRPTQGGQVSIALSSHWINPRRMTDHSIKECQKSLDFVLGWFAKPVFIDGDYPESMKNNLSSILPDFTESEKKFIKGTADFFALSFGPTLSFQLLDPHMKFRQLESPNLRQLLSWIDLEFNHPQIFIVENGWFVSGTTKRDDAKYMYYLKKFIMETLKAIKLDGVDVIGYTAWSLMDGFEWHRGYSIRRGLFYVDFLSQDKMLLPKSSALFYQKLIEKNGFPPLPENQPLEGTFPCDFAWGVVDNYIQVSQLTKPISSLTKPYHGGGGSGGGGSDKTHTCPPCPAPELLGGPSVFLFPPKPKDTLMISRTPEVTCVVVDVSHEDPEVKFNWYVDGVEVHNAKTKPREEQYNSTYRVVSVLTVLHQDWLNGKEYKCKVSNKALPAPIEKTISKAKGQPREPQVYTLPPSRDELTKNQVSLTCLVKGFYPSDIAVEWESNGQPENNYKTTPPVLDSDGSFFLYSKLTVDKSRWQQGNVFSCSVMHEALHNHYTQKSLSLSPGK

SEQ ID NO: 47 - protein, 1183 aa, Artificial Sequence
  Protein_36_981V_GS_IgG1_noCH1_Fc_Fusion
GDGAQTWARVSRPPAPEAAGLFQGTFPDGFLWAVGSAAYQTEGGWQQHGKGASIWDTFTHHPLAPPGDSRNASLPLGAPSPLQPATGDVASDSYNNVFRDTEALRELGVTHYRFSISWARVLPNGSAGVPNREGLRYYRRLLERLRELGVQPVVTLYHWDLPQRLQDAYGGWANRALADHFRDYAELCFRHFGGQVKYWITIDNPYVVAWHGYATGRLAPGIRGSPRLGYLVAHNLLLAHAKVWHLYNTSFRPTQGGQVSIALSSHWINPRRMTDHSIKECQKSLDFVLGWFAKPVFIDGDYPESMKNNLSSILPDFTESEKKFIKGTADFFALCFGPTLSFQLLDPHMKFRQLESPNLRQLLSWIDLEFNHPQIFIVENGWFVSGTTKRDDAKYMYYLKKFIMETLKAIKLDGVDVIGYTAWSLMDGFEWHRGYSIRRGLFYVDFLSQDKMLLPKSSALFYQKLIEKNGFPPLPENQPLEGTFPCDFAWGVVDNYIQVDTTLSQFTDLNVYLWDVHHSKRLIKVDGVVTKKRKSYCVDFAAIQPQIALLQEMHVTHFRFSLDWALILPLGNQSQVNHTILQYYRCMASELVRVNITPVVALWQPMAPNQGLPRLLARQGAWENPYTALAFAEYARLCFQELGHHVKLWITMNEPYTRNMTYSAGHNLLKAHALAWHVYNEKFRHAQNGKISIALQADWIEPACPFSQKDKEVAERVLEFDIGWLAEPIFGSGDYPWVMRDWLNQRNNFLLPYFTEDEKKLIQGTFDFLALSHYTTILVDSEKEDPIKYNDYLEVQEMTDITWLNSPSQVAVVPWGLRKVLNWLKFKYGDLPMYIISNGIDDGLHAEDDQLRVYYMQNYINEALKAHILDGINLCGYFAYSFNDRTAPRFGLYRYAADQFEPKASMKHYRKIIDSNGFPGPETLERFCPEEFTVCTECSFFHTRKSGGGGSGGGGSDKTHTCPPCPAPELLGGPSVFLFPPKPKDTLMISRTPEVTCVVVDVSHEDPEVKFNWYVDGVEVHNAKTKPREEQYNSTYRVVSVLTVLHQDWLNGKEYKCKVSNKALPAPIEKTISKAKGQPREPQVYTLPPSRDELTKNQVSLTCLVKGFYPSDIAVEWESNGQPENNYKTTPPVLDSDGSFFLYSKLTVDKSRWQQGNVFSCSVMHEALHNHYTQKSLSLSPGK

SEQ ID NO: 48 - protein, 1183 aa, Artificial Sequence
  Protein_36_981V_C370S_GS_IgG1_noCH1_Fc_Fusion
GDGAQTWARVSRPPAPEAAGLFQGTFPDGFLWAVGSAAYQTEGGWQQHGKGASIWDTFTHHPLAPPGDSRNASLPLGAPSPLQPATGDVASDSYNNVFRDTEALRELGVTHYRFSISWARVLPNGSAGVPNREGLRYYRRLLERLRELGVQPVVTLYHWDLPQRLQDAYGGWANRALADHFRDYAELCFRHFGGQVKYWITIDNPYVVAWHGYATGRLAPGIRGSPRLGYLVAHNLLLAHAKVWHLYNTSFRPTQGGQVSIALSSHWINPRRMTDHSIKECQKSLDFVLGWFAKPVFIDGDYPESMKNNLSSILPDFTESEKKFIKGTADFFALSFGPTLSFQLLDPHMKFRQLESPNLRQLLSWIDLEFNHPQIFIVENGWFVSGTTKRDDAKYMYYLKKFIMETLKAIKLDGVDVIGYTAWSLMDGFEWHRGYSIRRGLFYVDFLSQDKMLLPKSSALFYQKLIEKNGFPPLPENQPLEGTFPCDFAWGVVDNYIQVDTTLSQFTDLNVYLWDVHHSKRLIKVDGVVTKKRKSYCVDFAAIQPQIALLQEMHVTHFRFSLDWALILPLGNQSQVNHTILQYYRCMASELVRVNITPVVALWQPMAPNQGLPRLLARQGAWENPYTALAFAEYARLCFQELGHHVKLWITMNEPYTRNMTYSAGHNLLKAHALAWHVYNEKFRHAQNGKISIALQADWIEPACPFSQKDKEVAERVLEFDIGWLAEPIFGSGDYPWVMRDWLNQRNNFLLPYFTEDEKKLIQGTFDFLALSHYTTILVDSEKEDPIKYNDYLEVQEMTDITWLNSPSQVAVVPWGLRKVLNWLKFKYGDLPMYIISNGIDDGLHAEDDQLRVYYMQNYINEALKAHILDGINLCGYFAYSFNDRTAPRFGLYRYAADQFEPKASMKHYRKIIDSNGFPGPETLERFCPEEFTVCTECSFFHTRKSGGGGSGGGGSDKTHTCPPCPAPELLGGPSVFLFPPKPKDTLMISRTPEVTCVVVDVSHEDPEVKFNWYVDGVEVHNAKTKPREEQYNSTYRVVSVLTVLHQDWLNGKEYKCKVSNKALPAPIEKTISKAKGQPREPQVYTLPPSRDELTKNQVSLTCLVKGFYPSDIAVEWESNGQPENNYKTTPPVLDSDGSFFLYSKLTVDKSRWQQGNVFSCSVMHEALHNHYTQKSLSLSPGK

SEQ ID NO: 49 - protein, 751 aa, Artificial Sequence
  Protein_36_549V_GS_IgG1_noCH1_Fc_Fusion
GDGAQTWARVSRPPAPEAAGLFQGTFPDGFLWAVGSAAYQTEGGWQQHGKGASIWDTFTHHPLAPPGDSRNASLPLGAPSPLQPATGDVASDSYNNVFRDTEALRELGVTHYRFSISWARVLPNGSAGVPNREGLRYYRRLLERLRELGVQPVVTLYHWDLPQRLQDAYGGWANRALADHFRDYAELCFRHFGGQVKYWITIDNPYVVAWHGYATGRLAPGIRGSPRLGYLVAHNLLLAHAKVWHLYNTSFRPTQGGQVSIALSSHWINPRRMTDHSIKECQKSLDFVLGWFAKPVFIDGDYPESMKNNLSSILPDFTESEKKFIKGTADFFALCFGPTLSFQLLDPHMKFRQLESPNLRQLLSWIDLEFNHPQIFIVENGWFVSGTTKRDDAKYMYYLKKFIMETLKAIKLDGVDVIGYTAWSLMDGFEWHRGYSIRRGLFYVDFLSQDKMLLPKSSALFYQKLIEKNGFPPLPENQPLEGTFPCDFAWGVVDNYIQVSQLTKPISSLTKPYHGGGGSGGGGSDKTHTCPPCPAPELLGGPSVFLFPPKPKDTLMISRTPEVTCVVVDVSHEDPEVKFNWYVDGVEVHNAKTKPREEQYNSTYRVVSVLTVLHQDWLNGKEYKCKVSNKALPAPIEKTISKAKGQPREPQVYTLPPSRDELTKNQVSLTCLVKGFYPSDIAVEWESNGQPENNYKTTPPVLDSDGSFFLYSKLTVDKSRWQQGNVFSCSVMHEALHNHYTQKSLSLSPGK

SEQ ID NO: 50 - protein, 751 aa, Artificial Sequence
  Protein_36_549V_C370S_GS_IgG1_noCH1_Fc_Fusion
GDGAQTWARVSRPPAPEAAGLFQGTFPDGFLWAVGSAAYQTEGGWQQHGKGASIWDTFTHHPLAPPGDSRNASLPLGAPSPLQPATGDVASDSYNNVFRDTEALRELGVTHYRFSISWARVLPNGSAGVPNREGLRYYRRLLERLRELGVQPVVTLYHWDLPQRLQDAYGGWANRALADHFRDYAELCFRHFGGQVKYWITIDNPYVVAWHGYATGRLAPGIRGSPRLGYLVAHNLLLAHAKVWHLYNTSFRPTQGGQVSIALSSHWINPRRMTDHSIKECQKSLDFVLGWFAKPVFIDGDYPESMKNNLSSILPDFTESEKKFIKGTADFFALSFGPTLSFQLLDPHMKFRQLESPNLRQLLSWIDLEFNHPQIFIVENGWFVSGTTKRDDAKYMYYLKKFIMETLKAIKLDGVDVIGYTAWSLMDGFEWHRGYSIRRGLFYVDFLSQDKMLLPKSSALFYQKLIEKNGFPPLPENQPLEGTFPCDFAWGVVDNYIQVSQLTKPISSLTKPYHGGGGSGGGGSDKTHTCPPCPAPELLGGPSVFLFPPKPKDTLMISRTPEVTCVVVDVSHEDPEVKFNWYVDGVEVHNAKTKPREEQYNSTYRVVSVLTVLHQDWLNGKEYKCKVSNKALPAPIEKTISKAKGQPREPQVYTLPPSRDELTKNQVSLTCLVKGFYPSDIAVEWESNGQPENNYKTTPPVLDSDGSFFLYSKLTVDKSRWQQGNVFSCSVMHEALHNHYTQKSLSLSPGK

SEQ ID NO: 51 - protein, 1218 aa, Artificial Sequence
  Protein_Native_SS_34_981F_GS_IgG1_noCH1_Fc_Fusion
MPASAPPRRPRPPPPSLSLLLVLLGLGGRRLRAEPGDGAQTWARFSRPPAPEAAGLFQGTFPDGFLWAVGSAAYQTEGGWQQHGKGASIWDTFTHHPLAPPGDSRNASLPLGAPSPLQPATGDVASDSYNNVFRDTEALRELGVTHYRFSISWARVLPNGSAGVPNREGLRYYRRLLERLRELGVQPVVTLYHWDLPQRLQDAYGGWANRALADHFRDYAELCFRHFGGQVKYWITIDNPYVVAWHGYATGRLAPGIRGSPRLGYLVAHNLLLAHAKVWHLYNTSFRPTQGGQVSIALSSHWINPRRMTDHSIKECQKSLDFVLGWFAKPVFIDGDYPESMKNNLSSILPDFTESEKKFIKGTADFFALCFGPTLSFQLLDPHMKFRQLESPNLRQLLSWIDLEFNHPQIFIVENGWFVSGTTKRDDAKYMYYLKKFIMETLKAIKLDGVDVIGYTAWSLMDGFEWHRGYSIRRGLFYVDFLSQDKMLLPKSSALFYQKLIEKNGFPPLPENQPLEGTFPCDFAWGVVDNYIQVDTTLSQFTDLNVYLWDVHHSKRLIKVDGVVTKKRKSYCVDFAAIQPQIALLQEMHVTHFRFSLDWALILPLGNQSQVNHTILQYYRCMASELVRVNITPVVALWQPMAPNQGLPRLLARQGAWENPYTALAFAEYARLCFQELGHHVKLWITMNEPYTRNMTYSAGHNLLKAHALAWHVYNEKFRHAQNGKISIALQADWIEPACPFSQKDKEVAERVLEFDIGWLAEPIFGSGDYPWVMRDWLNQRNNFLLPYFTEDEKKLIQGTFDFLALSHYTTILVDSEKEDPIKYNDYLEVQEMTDITWLNSPSQVAVVPWGLRKVLNWLKFKYGDLPMYIISNGIDDGLHAEDDQLRVYYMQNYINEALKAHILDGINLCGYFAYSFNDRTAPRFGLYRYAADQFEPKASMKHYRKIIDSNGFPGPETLERFCPEEFTVCTECSFFHTRKSGGGGSGGGGSDKTHTCPPCPAPELLGGPSVFLFPPKPKDTLMISRTPEVTCVVVDVSHEDPEVKFNWYVDGVEVHNAKTKPREEQYNSTYRVVSVLTVLHQDWLNGKEYKCKVSNKALPAPIEKTISKAKGQPREPQVYTLPPSRDELTKNQVSLTCLVKGFYPSDIAVEWESNGQPENNYKTTPPVLDSDGSFFLYSKLTVDKSRWQQGNVFSCSVMHEALHNHYTQKSLSLSPGK

SEQ ID NO: 52 - protein, 1185 aa, Artificial Sequence
  Protein_34_981F_GS_IgG1_noCH1_Fc_Fusion
EPGDGAQTWARFSRPPAPEAAGLFQGTFPDGFLWAVGSAAYQTEGGWQQHGKGASIWDTFTHHPLAPPGDSRNASLPLGAPSPLQPATGDVASDSYNNVFRDTEALRELGVTHYRFSISWARVLPNGSAGVPNREGLRYYRRLLERLRELGVQPVVTLYHWDLPQRLQDAYGGWANRALADHFRDYAELCFRHFGGQVKYWITIDNPYVVAWHGYATGRLAPGIRGSPRLGYLVAHNLLLAHAKVWHLYNTSFRPTQGGQVSIALSSHWINPRRMTDHSIKECQKSLDFVLGWFAKPVFIDGDYPESMKNNLSSILPDFTESEKKFIKGTADFFALCFGPTLSFQLLDPHMKFRQLESPNLRQLLSWIDLEFNHPQIFIVENGWFVSGTTKRDDAKYMYYLKKFIMETLKAIKLDGVDVIGYTAWSLMDGFEWHRGYSIRRGLFYVDFLSQDKMLLPKSSALFYQKLIEKNGFPPLPENQPLEGTFPCDFAWGVVDNYIQVDTTLSQFTDLNVYLWDVHHSKRLIKVDGVVTKKRKSYCVDFAAIQPQIALLQEMHVTHFRFSLDWALILPLGNQSQVNHTILQYYRCMASELVRVNITPVVALWQPMAPNQGLPRLLARQGAWENPYTALAFAEYARLCFQELGHHVKLWITMNEPYTRNMTYSAGHNLLKAHALAWHVYNEKFRHAQNGKISIALQADWIEPACPFSQKDKEVAERVLEFDIGWLAEPIFGSGDYPWVMRDWLNQRNNFLLPYFTEDEKKLIQGTFDFLALSHYTTILVDSEKEDPIKYNDYLEVQEMTDITWLNSPSQVAVVPWGLRKVLNWLKFKYGDLPMYIISNGIDDGLHAEDDQLRVYYMQNYINEALKAHILDGINLCGYFAYSFNDRTAPRFGLYRYAADQFEPKASMKHYRKIIDSNGFPGPETLERFCPEEFTVCTECSFFHTRKSGGGGSGGGGSDKTHTCPPCPAPELLGGPSVFLFPPKPKDTLMISRTPEVTCVVVDVSHEDPEVKFNWYVDGVEVHNAKTKPREEQYNSTYRVVSVLTVLHQDWLNGKEYKCKVSNKALPAPIEKTISKAKGQPREPQVYTLPPSRDELTKNQVSLTCLVKGFYPSDIAVEWESNGQPENNYKTTPPVLDSDGSFFLYSKLTVDKSRWQQGNVFSCSVMHEALHNHYTQKSLSLSPGK

SEQ ID NO: 53 - protein, 786 aa, Artificial Sequence
  Protein_Native_SS_34_549F_GS_IgG1_noCH1_Fc_Fusion
MPASAPPRRPRPPPPSLSLLLVLLGLGGRRLRAEPGDGAQTWARFSRPPAPEAAGLFQGTFPDGFLWAVGSAAYQTEGGWQQHGKGASIWDTFTHHPLAPPGDSRNASLPLGAPSPLQPATGDVASDSYNNVFRDTEALRELGVTHYRFSISWARVLPNGSAGVPNREGLRYYRRLLERLRELGVQPVVTLYHWDLPQRLQDAYGGWANRALADHFRDYAELCFRHFGGQVKYWITIDNPYVVAWHGYATGRLAPGIRGSPRLGYLVAHNLLLAHAKVWHLYNTSFRPTQGGQVSIALSSHWINPRRMTDHSIKECQKSLDFVLGWFAKPVFIDGDYPESMKNNLSSILPDFTESEKKFIKGTADFFALCFGPTLSFQLLDPHMKFRQLESPNLRQLLSWIDLEFNHPQIFIVENGWFVSGTTKRDDAKYMYYLKKFIMETLKAIKLDGVDVIGYTAWSLMDGFEWHRGYSIRRGLFYVDFLSQDKMLLPKSSALFYQKLIEKNGFPPLPENQPLEGTFPCDFAWGVVDNYIQVSQLTKPISSLTKPYHGGGGSGGGGSDKTHTCPPCPAPELLGGPSVFLFPPKPKDTLMISRTPEVTCVVVDVSHEDPEVKFNWYVDGVEVHNAKTKPREEQYNSTYRVVSVLTVLHQDWLNGKEYKCKVSNKALPAPIEKTISKAKGQPREPQVYTLPPSRDELTKNQVSLTCLVKGFYPSDIAVEWESNGQPENNYKTTPPVLDSDGSFFLYSKLTVDKSRWQQGNVFSCSVMHEALHNHYTQKSLSLSPGK

SEQ ID NO: 54 - protein, 753 aa, Artificial Sequence
  Protein_34_549F_GS_IgG1_noCH1_Fc_Fusion
EPGDGAQTWARFSRPPAPEAAGLFQGTFPDGFLWAVGSAAYQTEGGWQQHGKGASIWDTFTHHPLAPPGDSRNASLPLGAPSPLQPATGDVASDSYNNVFRDTEALRELGVTHYRFSISWARVLPNGSAGVPNREGLRYYRRLLERLRELGVQPVVTLYHWDLPQRLQDAYGGWANRALADHFRDYAELCFRHFGGQVKYWITIDNPYVVAWHGYATGRLAPGIRGSPRLGYLVAHNLLLAHAKVWHLYNTSFRPTQGGQVSIALSSHWINPRRMTDHSIKECQKSLDFVLGWFAKPVFIDGDYPESMKNNLSSILPDFTESEKKFIKGTADFFALCFGPTLSFQLLDPHMKFRQLESPNLRQLLSWIDLEFNHPQIFIVENGWFVSGTTKRDDAKYMYYLKKFIMETLKAIKLDGVDVIGYTAWSLMDGFEWHRGYSIRRGLFYVDFLSQDKMLLPKSSALFYQKLIEKNGFPPLPENQPLEGTFPCDFAWGVVDNYIQVSQLTKPISSLTKPYHGGGGSGGGGSDKTHTCPPCPAPELLGGPSVFLFPPKPKDTLMISRTPEVTCVVVDVSHEDPEVKFNWYVDGVEVHNAKTKPREEQYNSTYRVVSVLTVLHQDWLNGKEYKCKVSNKALPAPIEKTISKAKGQPREPQVYTLPPSRDELTKNQVSLTCLVKGFYPSDIAVEWESNGQPENNYKTTPPVLDSDGSFFLYSKLTVDKSRWQQGNVFSCSVMHEALHNHYTQKSLSLSPGK

SEQ ID NO: 55 - protein, 1218 aa, Artificial Sequence
  Protein_Native_SS_34_981F_C370S_GS_IgG1_noCH1_Fc_Fusion
MPASAPPRRPRPPPPSLSLLLVLLGLGGRRLRAEPGDGAQTWARFSRPPAPEAAGLFQGTFPDGFLWAVGSAAYQTEGGWQQHGKGASIWDTFTHHPLAPPGDSRNASLPLGAPSPLQPATGDVASDSYNNVFRDTEALRELGVTHYRFSISWARVLPNGSAGVPNREGLRYYRRLLERLRELGVQPVVTLYHWDLPQRLQDAYGGWANRALADHFRDYAELCFRHFGGQVKYWITIDNPYVVAWHGYATGRLAPGIRGSPRLGYLVAHNLLLAHAKVWHLYNTSFRPTQGGQVSIALSSHWINPRRMTDHSIKECQKSLDFVLGWFAKPVFIDGDYPESMKNNLSSILPDFTESEKKFIKGTADFFALSFGPTLSFQLLDPHMKFRQLESPNLRQLLSWIDLEFNHPQIFIVENGWFVSGTTKRDDAKYMYYLKKFIMETLKAIKLDGVDVIGYTAWSLMDGFEWHRGYSIRRGLFYVDFLSQDKMLLPKSSALFYQKLIEKNGFPPLPENQPLEGTFPCDFAWGVVDNYIQVDTTLSQFTDLNVYLWDVHHSKRLIKVDGVVTKKRKSYCVDFAAIQPQIALLQEMHVTHFRFSLDWALILPLGNQSQVNHTILQYYRCMASELVRVNITPVVALWQPMAPNQGLPRLLARQGAWENPYTALAFAEYARLCFQELGHHVKLWITMNEPYTRNMTYSAGHNLLKAHALAWHVYNEKFRHAQNGKISIALQADWIEPACPFSQKDKEVAERVLEFDIGWLAEPIFGSGDYPWVMRDWLNQRNNFLLPYFTEDEKKLIQGTFDFLALSHYTTILVDSEKEDPIKYNDYLEVQEMTDITWLNSPSQVAVVPWGLRKVLNWLKFKYGDLPMYIISNGIDDGLHAEDDQLRVYYMQNYINEALKAHILDGINLCGYFAYSFNDRTAPRFGLYRYAADQFEPKASMKHYRKIIDSNGFPGPETLERFCPEEFTVCTECSFFHTRKSGGGGSGGGGSDKTHTCPPCPAPELLGGPSVFLFPPKPKDTLMISRTPEVTCVVVDVSHEDPEVKFNWYVDGVEVHNAKTKPREEQYNSTYRVVSVLTVLHQDWLNGKEYKCKVSNKALPAPIEKTISKAKGQPREPQVYTLPPSRDELTKNQVSLTCLVKGFYPSDIAVEWESNGQPENNYKTTPPVLDSDGSFFLYSKLTVDKSRWQQGNVFSCSVMHEALHNHYTQKSLSLSPGK

SEQ ID NO: 56 - protein, 1185 aa, Artificial Sequence
  Protein_34_981F_C370S_GS_IgG1_noCH1_Fc_Fusion
EPGDGAQTWARFSRPPAPEAAGLFQGTFPDGFLWAVGSAAYQTEGGWQQHGKGASIWDTFTHHPLAPPGDSRNASLPLGAPSPLQPATGDVASDSYNNVFRDTEALRELGVTHYRFSISWARVLPNGSAGVPNREGLRYYRRLLERLRELGVQPVVTLYHWDLPQRLQDAYGGWANRALADHFRDYAELCFRHFGGQVKYWITIDNPYVVAWHGYATGRLAPGIRGSPRLGYLVAHNLLLAHAKVWHLYNTSFRPTQGGQVSIALSSHWINPRRMTDHSIKECQKSLDFVLGWFAKPVFIDGDYPESMKNNLSSILPDFTESEKKFIKGTADFFALSFGPTLSFQLLDPHMKFRQLESPNLRQLLSWIDLEFNHPQIFIVENGWFVSGTTKRDDAKYMYYLKKFIMETLKAIKLDGVDVIGYTAWSLMDGFEWHRGYSIRRGLFYVDFLSQDKMLLPKSSALFYQKLIEKNGFPPLPENQPLEGTFPCDFAWGVVDNYIQVDTTLSQFTDLNVYLWDVHHSKRLIKVDGVVTKKRKSYCVDFAAIQPQIALLQEMHVTHFRFSLDWALILPLGNQSQVNHTILQYYRCMASELVRVNITPVVALWQPMAPNQGLPRLLARQGAWENPYTALAFAEYARLCFQELGHHVKLWITMNEPYTRNMTYSAGHNLLKAHALAWHVYNEKFRHAQNGKISIALQADWIEPACPFSQKDKEVAERVLEFDIGWLAEPIFGSGDYPWVMRDWLNQRNNFLLPYFTEDEKKLIQGTFDFLALSHYTTILVDSEKEDPIKYNDYLEVQEMTDITWLNSPSQVAVVPWGLRKVLNWLKFKYGDLPMYIISNGIDDGLHAEDDQLRVYYMQNYINEALKAHILDGINLCGYFAYSFNDRTAPRFGLYRYAADQFEPKASMKHYRKIIDSNGFPGPETLERFCPEEFTVCTECSFFHTRKSGGGGSGGGGSDKTHTCPPCPAPELLGGPSVFLFPPKPKDTLMISRTPEVTCVVVDVSHEDPEVKFNWYVDGVEVHNAKTKPREEQYNSTYRVVSVLTVLHQDWLNGKEYKCKVSNKALPAPIEKTISKAKGQPREPQVYTLPPSRDELTKNQVSLTCLVKGFYPSDIAVEWESNGQPENNYKTTPPVLDSDGSFFLYSKLTVDKSRWQQGNVFSCSVMHEALHNHYTQKSLSLSPGK

SEQ ID NO: 57 - protein, 786 aa, Artificial Sequence
  Protein_Native_SS_34_549F_C370S_GS_IgG1_noCH1_Fc_Fusion
MPASAPPRRPRPPPPSLSLLLVLLGLGGRRLRAEPGDGAQTWARFSRPPAPEAAGLFQGTFPDGFLWAVGSAAYQTEGGWQQHGKGASIWDTFTHHPLAPPGDSRNASLPLGAPSPLQPATGDVASDSYNNVFRDTEALRELGVTHYRFSISWARVLPNGSAGVPNREGLRYYRRLLERLRELGVQPVVTLYHWDLPQRLQDAYGGWANRALADHFRDYAELCFRHFGGQVKYWITIDNPYVVAWHGYATGRLAPGIRGSPRLGYLVAHNLLLAHAKVWHLYNTSFRPTQGGQVSIALSSHWINPRRMTDHSIKECQKSLDFVLGWFAKPVFIDGDYPESMKNNLSSILPDFTESEKKFIKGTADFFALSFGPTLSFQLLDPHMKFRQLESPNLRQLLSWIDLEFNHPQIFIVENGWFVSGTTKRDDAKYMYYLKKFIMETLKAIKLDGVDVIGYTAWSLMDGFEWHRGYSIRRGLFYVDFLSQDKMLLPKSSALFYQKLIEKNGFPPLPENQPLEGTFPCDFAWGVVDNYIQVSQLTKPISSLTKPYHGGGGSGGGGSDKTHTCPPCPAPELLGGPSVFLFPPKPKDTLMISRTPEVTCVVVDVSHEDPEVKFNWYVDGVEVHNAKTKPREEQYNSTYRVVSVLTVLHQDWLNGKEYKCKVSNKALPAPIEKTISKAKGQPREPQVYTLPPSRDELTKNQVSLTCLVKGFYPSDIAVEWESNGQPENNYKTTPPVLDSDGSFFLYSKLTVDKSRWQQGNVFSCSVMHEALHNHYTQKSLSLSPGK

SEQ ID NO: 58 - protein, 753 aa, Artificial Sequence
  Protein_34_549F_C370S_GS_IgG1_noCH1_Fc_Fusion
EPGDGAQTWARFSRPPAPEAAGLFQGTFPDGFLWAVGSAAYQTEGGWQQHGKGASIWDTFTHHPLAPPGDSRNASLPLGAPSPLQPATGDVASDSYNNVFRDTEALRELGVTHYRFSISWARVLPNGSAGVPNREGLRYYRRLLERLRELGVQPVVTLYHWDLPQRLQDAYGGWANRALADHFRDYAELCFRHFGGQVKYWITIDNPYVVAWHGYATGRLAPGIRGSPRLGYLVAHNLLLAHAKVWHLYNTSFRPTQGGQVSIALSSHWINPRRMTDHSIKECQKSLDFVLGWFAKPVFIDGDYPESMKNNLSSILPDFTESEKKFIKGTADFFALSFGPTLSFQLLDPHMKFRQLESPNLRQLLSWIDLEFNHPQIFIVENGWFVSGTTKRDDAKYMYYLKKFIMETLKAIKLDGVDVIGYTAWSLMDGFEWHRGYSIRRGLFYVDFLSQDKMLLPKSSALFYQKLIEKNGFPPLPENQPLEGTFPCDFAWGVVDNYIQVSQLTKPISSLTKPYHGGGGSGGGGSDKTHTCPPCPAPELLGGPSVFLFPPKPKDTLMISRTPEVTCVVVDVSHEDPEVKFNWYVDGVEVHNAKTKPREEQYNSTYRVVSVLTVLHQDWLNGKEYKCKVSNKALPAPIEKTISKAKGQPREPQVYTLPPSRDELTKNQVSLTCLVKGFYPSDIAVEWESNGQPENNYKTTPPVLDSDGSFFLYSKLTVDKSRWQQGNVFSCSVMHEALHNHYTQKSLSLSPGK

SEQ ID NO: 59 - protein, 1183 aa, Artificial Sequence
  Protein_36_981F_GS_IgG1_noCH1_Fc_Fusion
GDGAQTWARFSRPPAPEAAGLFQGTFPDGFLWAVGSAAYQTEGGWQQHGKGASIWDTFTHHPLAPPGDSRNASLPLGAPSPLQPATGDVASDSYNNVFRDTEALRELGVTHYRFSISWARVLPNGSAGVPNREGLRYYRRLLERLRELGVQPVVTLYHWDLPQRLQDAYGGWANRALADHFRDYAELCFRHFGGQVKYWITIDNPYVVAWHGYATGRLAPGIRGSPRLGYLVAHNLLLAHAKVWHLYNTSFRPTQGGQVSIALSSHWINPRRMTDHSIKECQKSLDFVLGWFAKPVFIDGDYPESMKNNLSSILPDFTESEKKFIKGTADFFALCFGPTLSFQLLDPHMKFRQLESPNLRQLLSWIDLEFNHPQIFIVENGWFVSGTTKRDDAKYMYYLKKFIMETLKAIKLDGVDVIGYTAWSLMDGFEWHRGYSIRRGLFYVDFLSQDKMLLPKSSALFYQKLIEKNGFPPLPENQPLEGTFPCDFAWGVVDNYIQVDTTLSQFTDLNVYLWDVHHSKRLIKVDGVVTKKRKSYCVDFAAIQPQIALLQEMHVTHFRFSLDWALILPLGNQSQVNHTILQYYRCMASELVRVNITPVVALWQPMAPNQGLPRLLARQGAWENPYTALAFAEYARLCFQELGHHVKLWITMNEPYTRNMTYSAGHNLLKAHALAWHVYNEKFRHAQNGKISIALQADWIEPACPFSQKDKEVAERVLEFDIGWLAEPIFGSGDYPWVMRDWLNQRNNFLLPYFTEDEKKLIQGTFDFLALSHYTTILVDSEKEDPIKYNDYLEVQEMTDITWLNSPSQVAVVPWGLRKVLNWLKFKYGDLPMYIISNGIDDGLHAEDDQLRVYYMQNYINEALKAHILDGINLCGYFAYSFNDRTAPRFGLYRYAADQFEPKASMKHYRKIIDSNGFPGPETLERFCPEEFTVCTECSFFHTRKSGGGGSGGGGSDKTHTCPPCPAPELLGGPSVFLFPPKPKDTLMISRTPEVTCVVVDVSHEDPEVKFNWYVDGVEVHNAKTKPREEQYNSTYRVVSVLTVLHQDWLNGKEYKCKVSNKALPAPIEKTISKAKGQPREPQVYTLPPSRDELTKNQVSLTCLVKGFYPSDIAVEWESNGQPENNYKTTPPVLDSDGSFFLYSKLTVDKSRWQQGNVFSCSVMHEALHNHYTQKSLSLSPGK

SEQ ID NO: 60 - protein, 1183 aa, Artificial Sequence
  Protein_36_981F_C370S_GS_IgG1_noCH1_Fc_Fusion
GDGAQTWARFSRPPAPEAAGLFQGTFPDGFLWAVGSAAYQTEGGWQQHGKGASIWDTFTHHPLAPPGDSRNASLPLGAPSPLQPATGDVASDSYNNVFRDTEALRELGVTHYRFSISWARVLPNGSAGVPNREGLRYYRRLLERLRELGVQPVVTLYHWDLPQRLQDAYGGWANRALADHFRDYAELCFRHFGGQVKYWITIDNPYVVAWHGYATGRLAPGIRGSPRLGYLVAHNLLLAHAKVWHLYNTSFRPTQGGQVSIALSSHWINPRRMTDHSIKECQKSLDFVLGWFAKPVFIDGDYPESMKNNLSSILPDFTESEKKFIKGTADFFALSFGPTLSFQLLDPHMKFRQLESPNLRQLLSWIDLEFNHPQIFIVENGWFVSGTTKRDDAKYMYYLKKFIMETLKAIKLDGVDVIGYTAWSLMDGFEWHRGYSIRRGLFYVDFLSQDKMLLPKSSALFYQKLIEKNGFPPLPENQPLEGTFPCDFAWGVVDNYIQVDTTLSQFTDLNVYLWDVHHSKRLIKVDGVVTKKRKSYCVDFAAIQPQIALLQEMHVTHFRFSLDWALILPLGNQSQVNHTILQYYRCMASELVRVNITPVVALWQPMAPNQGLPRLLARQGAWENPYTALAFAEYARLCFQELGHHVKLWITMNEPYTRNMTYSAGHNLLKAHALAWHVYNEKFRHAQNGKISIALQADWIEPACPFSQKDKEVAERVLEFDIGWLAEPIFGSGDYPWVMRDWLNQRNNFLLPYFTEDEKKLIQGTFDFLALSHYTTILVDSEKEDPIKYNDYLEVQEMTDITWLNSPSQVAVVPWGLRKVLNWLKFKYGDLPMYIISNGIDDGLHAEDDQLRVYYMQNYINEALKAHILDGINLCGYFAYSFNDRTAPRFGLYRYAADQFEPKASMKHYRKIIDSNGFPGPETLERFCPEEFTVCTECSFFHTRKSGGGGSGGGGSDKTHTCPPCPAPELLGGPSVFLFPPKPKDTLMISRTPEVTCVVVDVSHEDPEVKFNWYVDGVEVHNAKTKPREEQYNSTYRVVSVLTVLHQDWLNGKEYKCKVSNKALPAPIEKTISKAKGQPREPQVYTLPPSRDELTKNQVSLTCLVKGFYPSDIAVEWESNGQPENNYKTTPPVLDSDGSFFLYSKLTVDKSRWQQGNVFSCSVMHEALHNHYTQKSLSLSPGK

SEQ ID NO: 61 - protein, 751 aa, Artificial Sequence
  Protein_36_549F_GS_IgG1_noCH1_Fc_Fusion
GDGAQTWARFSRPPAPEAAGLFQGTFPDGFLWAVGSAAYQTEGGWQQHGKGASIWDTFTHHPLAPPGDSRNASLPLGAPSPLQPATGDVASDSYNNVFRDTEALRELGVTHYRFSISWARVLPNGSAGVPNREGLRYYRRLLERLRELGVQPVVTLYHWDLPQRLQDAYGGWANRALADHFRDYAELCFRHFGGQVKYWITIDNPYVVAWHGYATGRLAPGIRGSPRLGYLVAHNLLLAHAKVWHLYNTSFRPTQGGQVSIALSSHWINPRRMTDHSIKECQKSLDFVLGWFAKPVFIDGDYPESMKNNLSSILPDFTESEKKFIKGTADFFALCFGPTLSFQLLDPHMKFRQLESPNLRQLLSWIDLEFNHPQIFIVENGWFVSGTTKRDDAKYMYYLKKFIMETLKAIKLDGVDVIGYTAWSLMDGFEWHRGYSIRRGLFYVDFLSQDKMLLPKSSALFYQKLIEKNGFPPLPENQPLEGTFPCDFAWGVVDNYIQVSQLTKPISSLTKPYHGGGGSGGGGSDKTHTCPPCPAPELLGGPSVFLFPPKPKDTLMISRTPEVTCVVVDVSHEDPEVKFNWYVDGVEVHNAKTKPREEQYNSTYRVVSVLTVLHQDWLNGKEYKCKVSNKALPAPIEKTISKAKGQPREPQVYTLPPSRDELTKNQVSLTCLVKGFYPSDIAVEWESNGQPENNYKTTPPVLDSDGSFFLYSKLTVDKSRWQQGNVFSCSVMHEALHNHYTQKSLSLSPGK

SEQ ID NO: 62 - protein, 751 aa, Artificial Sequence
  Protein_36_549F_C370S_GS_IgG1_noCH1_Fc_Fusion
GDGAQTWARFSRPPAPEAAGLFQGTFPDGFLWAVGSAAYQTEGGWQQHGKGASIWDTFTHHPLAPPGDSRNASLPLGAPSPLQPATGDVASDSYNNVFRDTEALRELGVTHYRFSISWARVLPNGSAGVPNREGLRYYRRLLERLRELGVQPVVTLYHWDLPQRLQDAYGGWANRALADHFRDYAELCFRHFGGQVKYWITIDNPYVVAWHGYATGRLAPGIRGSPRLGYLVAHNLLLAHAKVWHLYNTSFRPTQGGQVSIALSSHWINPRRMTDHSIKECQKSLDFVLGWFAKPVFIDGDYPESMKNNLSSILPDFTESEKKFIKGTADFFALSFGPTLSFQLLDPHMKFRQLESPNLRQLLSWIDLEFNHPQIFIVENGWFVSGTTKRDDAKYMYYLKKFIMETLKAIKLDGVDVIGYTAWSLMDGFEWHRGYSIRRGLFYVDFLSQDKMLLPKSSALFYQKLIEKNGFPPLPENQPLEGTFPCDFAWGVVDNYIQVSQLTKPISSLTKPYHGGGGSGGGGSDKTHTCPPCPAPELLGGPSVFLFPPKPKDTLMISRTPEVTCVVVDVSHEDPEVKFNWYVDGVEVHNAKTKPREEQYNSTYRVVSVLTVLHQDWLNGKEYKCKVSNKALPAPIEKTISKAKGQPREPQVYTLPPSRDELTKNQVSLTCLVKGFYPSDIAVEWESNGQPENNYKTTPPVLDSDGSFFLYSKLTVDKSRWQQGNVFSCSVMHEALHNHYTQKSLSLSPGK

SEQ ID NO: 63 - protein, 988 aa, Artificial Sequence
  Protein_34_981V_TEV_TwinStrep
EPGDGAQTWARVSRPPAPEAAGLFQGTFPDGFLWAVGSAAYQTEGGWQQHGKGASIWDTFTHHPLAPPGDSRNASLPLGAPSPLQPATGDVASDSYNNVFRDTEALRELGVTHYRFSISWARVLPNGSAGVPNREGLRYYRRLLERLRELGVQPVVTLYHWDLPQRLQDAYGGWANRALADHFRDYAELCFRHFGGQVKYWITIDNPYVVAWHGYATGRLAPGIRGSPRLGYLVAHNLLLAHAKVWHLYNTSFRPTQGGQVSIALSSHWINPRRMTDHSIKECQKSLDFVLGWFAKPVFIDGDYPESMKNNLSSILPDFTESEKKFIKGTADFFALCFGPTLSFQLLDPHMKFRQLESPNLRQLLSWIDLEFNHPQIFIVENGWFVSGTTKRDDAKYMYYLKKFIMETLKAIKLDGVDVIGYTAWSLMDGFEWHRGYSIRRGLFYVDFLSQDKMLLPKSSALFYQKLIEKNGFPPLPENQPLEGTFPCDFAWGVVDNYIQVDTTLSQFTDLNVYLWDVHHSKRLIKVDGVVTKKRKSYCVDFAAIQPQIALLQEMHVTHFRFSLDWALILPLGNQSQVNHTILQYYRCMASELVRVNITPVVALWQPMAPNQGLPRLLARQGAWENPYTALAFAEYARLCFQELGHHVKLWITMNEPYTRNMTYSAGHNLLKAHALAWHVYNEKFRHAQNGKISIALQADWIEPACPFSQKDKEVAERVLEFDIGWLAEPIFGSGDYPWVMRDWLNQRNNFLLPYFTEDEKKLIQGTFDFLALSHYTTILVDSEKEDPIKYNDYLEVQEMTDITWLNSPSQVAVVPWGLRKVLNWLKFKYGDLPMYIISNGIDDGLHAEDDQLRVYYMQNYINEALKAHILDGINLCGYFAYSFNDRTAPRFGLYRYAADQFEPKASMKHYRKIIDSNGFPGPETLERFCPEEFTVCTECSFFHTRKSGGENLYFQSSAWSHPQFEKGGGSGGGSGGSSAWSHPQFEK

SEQ ID NO: 64 - protein, 956 aa, Artificial Sequence
  Protein_34_981V_minus_TEV_TwinStrep
EPGDGAQTWARVSRPPAPEAAGLFQGTFPDGFLWAVGSAAYQTEGGWQQHGKGASIWDTFTHHPLAPPGDSRNASLPLGAPSPLQPATGDVASDSYNNVFRDTEALRELGVTHYRFSISWARVLPNGSAGVPNREGLRYYRRLLERLRELGVQPVVTLYHWDLPQRLQDAYGGWANRALADHFRDYAELCFRHFGGQVKYWITIDNPYVVAWHGYATGRLAPGIRGSPRLGYLVAHNLLLAHAKVWHLYNTSFRPTQGGQVSIALSSHWINPRRMTDHSIKECQKSLDFVLGWFAKPVFIDGDYPESMKNNLSSILPDFTESEKKFIKGTADFFALCFGPTLSFQLLDPHMKFRQLESPNLRQLLSWIDLEFNHPQIFIVENGWFVSGTTKRDDAKYMYYLKKFIMETLKAIKLDGVDVIGYTAWSLMDGFEWHRGYSIRRGLFYVDFLSQDKMLLPKSSALFYQKLIEKNGFPPLPENQPLEGTFPCDFAWGVVDNYIQVDTTLSQFTDLNVYLWDVHHSKRLIKVDGVVTKKRKSYCVDFAAIQPQIALLQEMHVTHFRFSLDWALILPLGNQSQVNHTILQYYRCMASELVRVNITPVVALWQPMAPNQGLPRLLARQGAWENPYTALAFAEYARLCFQELGHHVKLWITMNEPYTRNMTYSAGHNLLKAHALAWHVYNEKFRHAQNGKISIALQADWIEPACPFSQKDKEVAERVLEFDIGWLAEPIFGSGDYPWVMRDWLNQRNNFLLPYFTEDEKKLIQGTFDFLALSHYTTILVDSEKEDPIKYNDYLEVQEMTDITWLNSPSQVAVVPWGLRKVLNWLKFKYGDLPMYIISNGIDDGLHAEDDQLRVYYMQNYINEALKAHILDGINLCGYFAYSFNDRTAPRFGLYRYAADQFEPKASMKHYRKIIDSNGFPGPETLERFCPEEFTVCTECSFFHTRKSGGENLYFQ

SEQ ID NO: 65 - protein, 988 aa, Artificial Sequence
  Protein_34_981F_TEV_TwinStrep
EPGDGAQTWARFSRPPAPEAAGLFQGTFPDGFLWAVGSAAYQTEGGWQQHGKGASIWDTFTHHPLAPPGDSRNASLPLGAPSPLQPATGDVASDSYNNVFRDTEALRELGVTHYRFSISWARVLPNGSAGVPNREGLRYYRRLLERLRELGVQPVVTLYHWDLPQRLQDAYGGWANRALADHFRDYAELCFRHFGGQVKYWITIDNPYVVAWHGYATGRLAPGIRGSPRLGYLVAHNLLLAHAKVWHLYNTSFRPTQGGQVSIALSSHWINPRRMTDHSIKECQKSLDFVLGWFAKPVFIDGDYPESMKNNLSSILPDFTESEKKFIKGTADFFALCFGPTLSFQLLDPHMKFRQLESPNLRQLLSWIDLEFNHPQIFIVENGWFVSGTTKRDDAKYMYYLKKFIMETLKAIKLDGVDVIGYTAWSLMDGFEWHRGYSIRRGLFYVDFLSQDKMLLPKSSALFYQKLIEKNGFPPLPENQPLEGTFPCDFAWGVVDNYIQVDTTLSQFTDLNVYLWDVHHSKRLIKVDGVVTKKRKSYCVDFAAIQPQIALLQEMHVTHFRFSLDWALILPLGNQSQVNHTILQYYRCMASELVRVNITPVVALWQPMAPNQGLPRLLARQGAWENPYTALAFAEYARLCFQELGHHVKLWITMNEPYTRNMTYSAGHNLLKAHALAWHVYNEKFRHAQNGKISIALQADWIEPACPFSQKDKEVAERVLEFDIGWLAEPIFGSGDYPWVMRDWLNQRNNFLLPYFTEDEKKLIQGTFDFLALSHYTTILVDSEKEDPIKYNDYLEVQEMTDITWLNSPSQVAVVPWGLRKVLNWLKFKYGDLPMYIISNGIDDGLHAEDDQLRVYYMQNYINEALKAHILDGINLCGYFAYSFNDRTAPRFGLYRYAADQFEPKASMKHYRKIIDSNGFPGPETLERFCPEEFTVCTECSFFHTRKSGGENLYFQSSAWSHPQFEKGGGSGGGSGGSSAWSHPQFEK

SEQ ID NO: 66 - protein, 956 aa, Artificial Sequence
  Protein_34_981F_minus_TEV_TwinStrep
EPGDGAQTWARFSRPPAPEAAGLFQGTFPDGFLWAVGSAAYQTEGGWQQHGKGASIWDTFTHHPLAPPGDSRNASLPLGAPSPLQPATGDVASDSYNNVFRDTEALRELGVTHYRFSISWARVLPNGSAGVPNREGLRYYRRLLERLRELGVQPVVTLYHWDLPQRLQDAYGGWANRALADHFRDYAELCFRHFGGQVKYWITIDNPYVVAWHGYATGRLAPGIRGSPRLGYLVAHNLLLAHAKVWHLYNTSFRPTQGGQVSIALSSHWINPRRMTDHSIKECQKSLDFVLGWFAKPVFIDGDYPESMKNNLSSILPDFTESEKKFIKGTADFFALCFGPTLSFQLLDPHMKFRQLESPNLRQLLSWIDLEFNHPQIFIVENGWFVSGTTKRDDAKYMYYLKKFIMETLKAIKLDGVDVIGYTAWSLMDGFEWHRGYSIRRGLFYVDFLSQDKMLLPKSSALFYQKLIEKNGFPPLPENQPLEGTFPCDFAWGVVDNYIQVDTTLSQFTDLNVYLWDVHHSKRLIKVDGVVTKKRKSYCVDFAAIQPQIALLQEMHVTHFRFSLDWALILPLGNQSQVNHTILQYYRCMASELVRVNITPVVALWQPMAPNQGLPRLLARQGAWENPYTALAFAEYARLCFQELGHHVKLWITMNEPYTRNMTYSAGHNLLKAHALAWHVYNEKFRHAQNGKISIALQADWIEPACPFSQKDKEVAERVLEFDIGWLAEPIFGSGDYPWVMRDWLNQRNNFLLPYFTEDEKKLIQGTFDFLALSHYTTILVDSEKEDPIKYNDYLEVQEMTDITWLNSPSQVAVVPWGLRKVLNWLKFKYGDLPMYIISNGIDDGLHAEDDQLRVYYMQNYINEALKAHILDGINLCGYFAYSFNDRTAPRFGLYRYAADQFEPKASMKHYRKIIDSNGFPGPETLERFCPEEFTVCTECSFFHTRKSGGENLYFQ

SEQ ID NO: 67 - protein, 988 aa, Artificial Sequence
  Protein_34_981V_C370S_TEV_TwinStrep
EPGDGAQTWARVSRPPAPEAAGLFQGTFPDGFLWAVGSAAYQTEGGWQQHGKGASIWDTFTHHPLAPPGDSRNASLPLGAPSPLQPATGDVASDSYNNVFRDTEALRELGVTHYRFSISWARVLPNGSAGVPNREGLRYYRRLLERLRELGVQPVVTLYHWDLPQRLQDAYGGWANRALADHFRDYAELCFRHFGGQVKYWITIDNPYVVAWHGYATGRLAPGIRGSPRLGYLVAHNLLLAHAKVWHLYNTSFRPTQGGQVSIALSSHWINPRRMTDHSIKECQKSLDFVLGWFAKPVFIDGDYPESMKNNLSSILPDFTESEKKFIKGTADFFALSFGPTLSFQLLDPHMKFRQLESPNLRQLLSWIDLEFNHPQIFIVENGWFVSGTTKRDDAKYMYYLKKFIMETLKAIKLDGVDVIGYTAWSLMDGFEWHRGYSIRRGLFYVDFLSQDKMLLPKSSALFYQKLIEKNGFPPLPENQPLEGTFPCDFAWGVVDNYIQVDTTLSQFTDLNVYLWDVHHSKRLIKVDGVVTKKRKSYCVDFAAIQPQIALLQEMHVTHFRFSLDWALILPLGNQSQVNHTILQYYRCMASELVRVNITPVVALWQPMAPNQGLPRLLARQGAWENPYTALAFAEYARLCFQELGHHVKLWITMNEPYTRNMTYSAGHNLLKAHALAWHVYNEKFRHAQNGKISIALQADWIEPACPFSQKDKEVAERVLEFDIGWLAEPIFGSGDYPWVMRDWLNQRNNFLLPYFTEDEKKLIQGTFDFLALSHYTTILVDSEKEDPIKYNDYLEVQEMTDITWLNSPSQVAVVPWGLRKVLNWLKFKYGDLPMYIISNGIDDGLHAEDDQLRVYYMQNYINEALKAHILDGINLCGYFAYSFNDRTAPRFGLYRYAADQFEPKASMKHYRKIIDSNGFPGPETLERFCPEEFTVCTECSFFHTRKSGGENLYFQSSAWSHPQFEKGGGSGGGSGGSSAWSHPQFEK

SEQ ID NO: 68 - protein, 956 aa, Artificial Sequence
  Protein_34_981V_C370S_minus_TEV_TwinStrep
EPGDGAQTWARVSRPPAPEAAGLFQGTFPDGFLWAVGSAAYQTEGGWQQHGKGASIWDTFTHHPLAPPGDSRNASLPLGAPSPLQPATGDVASDSYNNVFRDTEALRELGVTHYRFSISWARVLPNGSAGVPNREGLRYYRRLLERLRELGVQPVVTLYHWDLPQRLQDAYGGWANRALADHFRDYAELCFRHFGGQVKYWITIDNPYVVAWHGYATGRLAPGIRGSPRLGYLVAHNLLLAHAKVWHLYNTSFRPTQGGQVSIALSSHWINPRRMTDHSIKECQKSLDFVLGWFAKPVFIDGDYPESMKNNLSSILPDFTESEKKFIKGTADFFALSFGPTLSFQLLDPHMKFRQLESPNLRQLLSWIDLEFNHPQIFIVENGWFVSGTTKRDDAKYMYYLKKFIMETLKAIKLDGVDVIGYTAWSLMDGFEWHRGYSIRRGLFYVDFLSQDKMLLPKSSALFYQKLIEKNGFPPLPENQPLEGTFPCDFAWGVVDNYIQVDTTLSQFTDLNVYLWDVHHSKRLIKVDGVVTKKRKSYCVDFAAIQPQIALLQEMHVTHFRFSLDWALILPLGNQSQVNHTILQYYRCMASELVRVNITPVVALWQPMAPNQGLPRLLARQGAWENPYTALAFAEYARLCFQELGHHVKLWITMNEPYTRNMTYSAGHNLLKAHALAWHVYNEKFRHAQNGKISIALQADWIEPACPFSQKDKEVAERVLEFDIGWLAEPIFGSGDYPWVMRDWLNQRNNFLLPYFTEDEKKLIQGTFDFLALSHYTTILVDSEKEDPIKYNDYLEVQEMTDITWLNSPSQVAVVPWGLRKVLNWLKFKYGDLPMYIISNGIDDGLHAEDDQLRVYYMQNYINEALKAHILDGINLCGYFAYSFNDRTAPRFGLYRYAADQFEPKASMKHYRKIIDSNGFPGPETLERFCPEEFTVCTECSFFHTRKSGGENLYFQ

SEQ ID NO: 69 - protein, 988 aa, Artificial Sequence
  Protein_34_981F_C370S_TEV_TwinStrep
EPGDGAQTWARFSRPPAPEAAGLFQGTFPDGFLWAVGSAAYQTEGGWQQHGKGASIWDTFTHHPLAPPGDSRNASLPLGAPSPLQPATGDVASDSYNNVFRDTEALRELGVTHYRFSISWARVLPNGSAGVPNREGLRYYRRLLERLRELGVQPVVTLYHWDLPQRLQDAYGGWANRALADHFRDYAELCFRHFGGQVKYWITIDNPYVVAWHGYATGRLAPGIRGSPRLGYLVAHNLLLAHAKVWHLYNTSFRPTQGGQVSIALSSHWINPRRMTDHSIKECQKSLDFVLGWFAKPVFIDGDYPESMKNNLSSILPDFTESEKKFIKGTADFFALSFGPTLSFQLLDPHMKFRQLESPNLRQLLSWIDLEFNHPQIFIVENGWFVSGTTKRDDAKYMYYLKKFIMETLKAIKLDGVDVIGYTAWSLMDGFEWHRGYSIRRGLFYVDFLSQDKMLLPKSSALFYQKLIEKNGFPPLPENQPLEGTFPCDFAWGVVDNYIQVDTTLSQFTDLNVYLWDVHHSKRLIKVDGVVTKKRKSYCVDFAAIQPQIALLQEMHVTHFRFSLDWALILPLGNQSQVNHTILQYYRCMASELVRVNITPVVALWQPMAPNQGLPRLLARQGAWENPYTALAFAEYARLCFQELGHHVKLWITMNEPYTRNMTYSAGHNLLKAHALAWHVYNEKFRHAQNGKISIALQADWIEPACPFSQKDKEVAERVLEFDIGWLAEPIFGSGDYPWVMRDWLNQRNNFLLPYFTEDEKKLIQGTFDFLALSHYTTILVDSEKEDPIKYNDYLEVQEMTDITWLNSPSQVAVVPWGLRKVLNWLKFKYGDLPMYIISNGIDDGLHAEDDQLRVYYMQNYINEALKAHILDGINLCGYFAYSFNDRTAPRFGLYRYAADQFEPKASMKHYRKIIDSNGFPGPETLERFCPEEFTVCTECSFFHTRKSGGENLYFQSSAWSHPQFEKGGGSGGGSGGSSAWSHPQFEK

SEQ ID NO: 70 - protein, 956 aa, Artificial Sequence
  Protein_34_981F_C370S_minus_TEV_TwinStrep
EPGDGAQTWARFSRPPAPEAAGLFQGTFPDGFLWAVGSAAYQTEGGWQQHGKGASIWDTFTHHPLAPPGDSRNASLPLGAPSPLQPATGDVASDSYNNVFRDTEALRELGVTHYRFSISWARVLPNGSAGVPNREGLRYYRRLLERLRELGVQPVVTLYHWDLPQRLQDAYGGWANRALADHFRDYAELCFRHFGGQVKYWITIDNPYVVAWHGYATGRLAPGIRGSPRLGYLVAHNLLLAHAKVWHLYNTSFRPTQGGQVSIALSSHWINPRRMTDHSIKECQKSLDFVLGWFAKPVFIDGDYPESMKNNLSSILPDFTESEKKFIKGTADFFALSFGPTLSFQLLDPHMKFRQLESPNLRQLLSWIDLEFNHPQIFIVENGWFVSGTTKRDDAKYMYYLKKFIMETLKAIKLDGVDVIGYTAWSLMDGFEWHRGYSIRRGLFYVDFLSQDKMLLPKSSALFYQKLIEKNGFPPLPENQPLEGTFPCDFAWGVVDNYIQVDTTLSQFTDLNVYLWDVHHSKRLIKVDGVVTKKRKSYCVDFAAIQPQIALLQEMHVTHFRFSLDWALILPLGNQSQVNHTILQYYRCMASELVRVNITPVVALWQPMAPNQGLPRLLARQGAWENPYTALAFAEYARLCFQELGHHVKLWITMNEPYTRNMTYSAGHNLLKAHALAWHVYNEKFRHAQNGKISIALQADWIEPACPFSQKDKEVAERVLEFDIGWLAEPIFGSGDYPWVMRDWLNQRNNFLLPYFTEDEKKLIQGTFDFLALSHYTTILVDSEKEDPIKYNDYLEVQEMTDITWLNSPSQVAVVPWGLRKVLNWLKFKYGDLPMYIISNGIDDGLHAEDDQLRVYYMQNYINEALKAHILDGINLCGYFAYSFNDRTAPRFGLYRYAADQFEPKASMKHYRKIIDSNGFPGPETLERFCPEEFTVCTECSFFHTRKSGGENLYFQ

SEQ ID NO: 71 - protein, 33 aa, Homo sapiens
MPASAPPRRPRPPPPSLSLLLVLLGLGGRRLRA

SEQ ID NO: 72 - protein, 19 aa, Artificial Sequence
  Protein_Synthetic_Signal_Peptide
MARLTVLALLAGLLASSRA

SEQ ID NO: 73 - protein, 10 aa, Artificial Sequence
  Protein_GS_linker
GGGGSGGGGS

SEQ ID NO: 74 - protein, 227 aa, Artificial Sequence
  Protein_ IgG1_noCH1_Fc_Fusion
DKTHTCPPCPAPELLGGPSVFLFPPKPKDTLMISRTPEVTCVVVDVSHEDPEVKFNWYVDGVEVHNAKTKPREEQYNSTYRVVSVLTVLHQDWLNGKEYKCKVSNKALPAPIEKTISKAKGQPREPQVYTLPPSRDELTKNQVSLTCLVKGFYPSDIAVEWESNGQPENNYKTTPPVLDSDGSFFLYSKLTVDKSRWQQGNVFSCSVMHEALHNHYTQKSLSLSPGK

SEQ ID NO: 75 - protein, 40 aa, Artificial Sequence
  Protein_TwinStrep
GGENLYFQSSAWSHPQFEKGGGSGGGSGGSSAWSHPQFEK

SEQ ID NO: 76 - DNA, 3036 bp, Homo sapiens
atgcccgccagcgccccgccgcgccgcccgcggccgccgccgccgtcgctgtcgctgctgctggtgctgctgggcctgggcggccgccgcctgcgtgcggagccgggcgacggcgcgcagacctgggcccgtgtctcgcggcctcctgcccccgaggccgcgggcctcttccagggcaccttccccgacggcttcctctgggccgtgggcagcgccgcctaccagaccgagggcggctggcagcagcacggcaagggtgcgtccatctgggacacgttcacccaccaccccctggcacccccgggagactcccggaacgccagtctgccgttgggcgccccgtcgccgctgcagcccgccaccggggacgtagccagcgacagctacaacaacgtcttccgcgacacggaggcgctgcgcgagctcggggtcactcactaccgcttctccatctcgtgggcgcgagtgctccccaatggcagcgcgggcgtccccaaccgcgaggggctgcgctactaccggcgcctgctggagcggctgcgggagctgggcgtgcagcccgtggtcaccctgtaccactgggacctgccccagcgcctgcaggacgcctacggcggctgggccaaccgcgccctggccgaccacttcagggattacgcggagctctgcttccgccacttcggcggtcaggtcaagtactggatcaccatcgacaacccctacgtggtggcctggcacggctacgccaccgggcgcctggcccccggcatccggggcagcccgcggctcgggtacctggtggcgcacaacctcctcctggctcatgccaaagtctggcatctctacaatacttctttccgtcccactcagggaggtcaggtgtccattgccctaagctctcactggatcaatcctcgaagaatgaccgaccacagcatcaaagaatgtcaaaaatctctggactttgtactaggttggtttgccaaacccgtatttattgatggtgactatcccgagagcatgaagaataacctttcatctattctgcctgattttactgaatctgagaaaaagttcatcaaaggaactgctgacttttttgctctttgctttggacccaccttgagttttcaacttttggaccctcacatgaagttccgccaattggaatctcccaacctgaggcaactgctttcctggattgaccttgaatttaaccatcctcaaatatttattgtggaaaatggctggtttgtctcagggaccaccaagagagatgatgccaaatatatgtattacctcaaaaagttcatcatggaaaccttaaaagccatcaagctggatggggtggatgtcatcgggtataccgcatggtccctcatggatggtttcgagtggcacagaggttacagcatcaggcgtggactcttctatgttgactttctaagccaggacaagatgttgttgccaaagtcttcagccttgttctaccaaaagctgatagagaaaaatggcttccctcctttacctgaaaatcagcccctagaagggacatttccctgtgactttgcttggggagttgttgacaactacattcaagtagataccactctgtctcagtttaccgacctgaatgtttacctgtgggatgtccaccacagtaaaaggcttattaaagtggatggggttgtgaccaagaagaggaaatcctactgtgttgactttgctgccatccagccccagatcgctttactccaggaaatgcacgttacacattttcgcttctccctggactgggccctgattctccctctgggtaaccagtcccaggtgaaccacaccatcctgcagtactatcgctgcatggccagcgagcttgtccgtgtcaacatcaccccagtggtggccctgtggcagcctatggccccgaaccaaggactgccgcgcctcctggccaggcagggcgcctgggagaacccctacactgccctggcctttgcagagtatgcccgactgtgctttcaagagctcggccatcacgtcaagctttggataacgatgaatgagccgtatacaaggaatatgacatacagtgctggccacaaccttctgaaggcccatgccctggcttggcatgtgtacaatgaaaagtttaggcatgctcagaatgggaaaatatccatagccttgcaggctgattggatagaacctgcctgccctttctcccaaaaggacaaagaggtggccgagagagttttggaatttgacattggctggctggctgagcccattttcggctctggagattatccatgggtgatgagggactggctgaaccaaagaaacaattttcttcttccttatttcactgaagatgaaaaaaagctaatccagggtacctttgactttttggctttaagccattataccaccatccttgtagactcagaaaaagaagatccaataaaatacaatgattacctagaagtgcaagaaatgaccgacatcacgtggctcaactcccccagtcaggtggcggtagtgccctgggggttgcgcaaagtgctgaactggctgaagttcaagtacggagacctccccatgtacataatatccaacggaatcgatgacgggctgcatgctgaggacgaccagctgagggtgtattatatgcagaattacataaacgaagctctcaaagcccacatactggatggtatcaatctttgcggatactttgcttattcgtttaacgaccgcacagctccgaggtttggcctctatcgttatgctgcagatcagtttgagcccaaggcatccatgaaacattacaggaaaattattgacagcaatggtttcccgggcccagaaactctggaaagattttgtccagaagaattcaccgtgtgtactgagtgcagtttttttcacacccgaaagtctttactggctttcatagcttttctattttttgcttctattatttctctctcccttatattttactactcgaagaaaggcagaagaagttacaaa

SEQ ID NO: 77 - DNA, 2943 bp, Homo sapiens
atgcccgccagcgccccgccgcgccgcccgcggccgccgccgccgtcgctgtcgctgctgctggtgctgctgggcctgggcggccgccgcctgcgtgcggagccgggcgacggcgcgcagacctgggcccgtgtctcgcggcctcctgcccccgaggccgcgggcctcttccagggcaccttccccgacggcttcctctgggccgtgggcagcgccgcctaccagaccgagggcggctggcagcagcacggcaagggtgcgtccatctgggacacgttcacccaccaccccctggcacccccgggagactcccggaacgccagtctgccgttgggcgccccgtcgccgctgcagcccgccaccggggacgtagccagcgacagctacaacaacgtcttccgcgacacggaggcgctgcgcgagctcggggtcactcactaccgcttctccatctcgtgggcgcgagtgctccccaatggcagcgcgggcgtccccaaccgcgaggggctgcgctactaccggcgcctgctggagcggctgcgggagctgggcgtgcagcccgtggtcaccctgtaccactgggacctgccccagcgcctgcaggacgcctacggcggctgggccaaccgcgccctggccgaccacttcagggattacgcggagctctgcttccgccacttcggcggtcaggtcaagtactggatcaccatcgacaacccctacgtggtggcctggcacggctacgccaccgggcgcctggcccccggcatccggggcagcccgcggctcgggtacctggtggcgcacaacctcctcctggctcatgccaaagtctggcatctctacaatacttctttccgtcccactcagggaggtcaggtgtccattgccctaagctctcactggatcaatcctcgaagaatgaccgaccacagcatcaaagaatgtcaaaaatctctggactttgtactaggttggtttgccaaacccgtatttattgatggtgactatcccgagagcatgaagaataacctttcatctattctgcctgattttactgaatctgagaaaaagttcatcaaaggaactgctgacttttttgctctttgctttggacccaccttgagttttcaacttttggaccctcacatgaagttccgccaattggaatctcccaacctgaggcaactgctttcctggattgaccttgaatttaaccatcctcaaatatttattgtggaaaatggctggtttgtctcagggaccaccaagagagatgatgccaaatatatgtattacctcaaaaagttcatcatggaaaccttaaaagccatcaagctggatggggtggatgtcatcgggtataccgcatggtccctcatggatggtttcgagtggcacagaggttacagcatcaggcgtggactcttctatgttgactttctaagccaggacaagatgttgttgccaaagtcttcagccttgttctaccaaaagctgatagagaaaaatggcttccctcctttacctgaaaatcagcccctagaagggacatttccctgtgactttgcttggggagttgttgacaactacattcaagtagataccactctgtctcagtttaccgacctgaatgtttacctgtgggatgtccaccacagtaaaaggcttattaaagtggatggggttgtgaccaagaagaggaaatcctactgtgttgactttgctgccatccagccccagatcgctttactccaggaaatgcacgttacacattttcgcttctccctggactgggccctgattctccctctgggtaaccagtcccaggtgaaccacaccatcctgcagtactatcgctgcatggccagcgagcttgtccgtgtcaacatcaccccagtggtggccctgtggcagcctatggccccgaaccaaggactgccgcgcctcctggccaggcagggcgcctgggagaacccctacactgccctggcctttgcagagtatgcccgactgtgctttcaagagctcggccatcacgtcaagctttggataacgatgaatgagccgtatacaaggaatatgacatacagtgctggccacaaccttctgaaggcccatgccctggcttggcatgtgtacaatgaaaagtttaggcatgctcagaatgggaaaatatccatagccttgcaggctgattggatagaacctgcctgccctttctcccaaaaggacaaagaggtggccgagagagttttggaatttgacattggctggctggctgagcccattttcggctctggagattatccatgggtgatgagggactggctgaaccaaagaaacaattttcttcttccttatttcactgaagatgaaaaaaagctaatccagggtacctttgactttttggctttaagccattataccaccatccttgtagactcagaaaaagaagatccaataaaatacaatgattacctagaagtgcaagaaatgaccgacatcacgtggctcaactcccccagtcaggtggcggtagtgccctgggggttgcgcaaagtgctgaactggctgaagttcaagtacggagacctccccatgtacataatatccaacggaatcgatgacgggctgcatgctgaggacgaccagctgagggtgtattatatgcagaattacataaacgaagctctcaaagcccacatactggatggtatcaatctttgcggatactttgcttattcgtttaacgaccgcacagctccgaggtttggcctctatcgttatgctgcagatcagtttgagcccaaggcatccatgaaacattacaggaaaattattgacagcaatggtttcccgggcccagaaactctggaaagattttgtccagaagaattcaccgtgtgtactgagtgcagtttttttcacacccgaaagtct

SEQ ID NO: 78 - DNA, 2859 bp, Homo sapiens
cgccgcctgcgtgcggagccgggcgacggcgcgcagacctgggcccgtgtctcgcggcctcctgcccccgaggccgcgggcctcttccagggcaccttccccgacggcttcctctgggccgtgggcagcgccgcctaccagaccgagggcggctggcagcagcacggcaagggtgcgtccatctgggacacgttcacccaccaccccctggcacccccgggagactcccggaacgccagtctgccgttgggcgccccgtcgccgctgcagcccgccaccggggacgtagccagcgacagctacaacaacgtcttccgcgacacggaggcgctgcgcgagctcggggtcactcactaccgcttctccatctcgtgggcgcgagtgctccccaatggcagcgcgggcgtccccaaccgcgaggggctgcgctactaccggcgcctgctggagcggctgcgggagctgggcgtgcagcccgtggtcaccctgtaccactgggacctgccccagcgcctgcaggacgcctacggcggctgggccaaccgcgccctggccgaccacttcagggattacgcggagctctgcttccgccacttcggcggtcaggtcaagtactggatcaccatcgacaacccctacgtggtggcctggcacggctacgccaccgggcgcctggcccccggcatccggggcagcccgcggctcgggtacctggtggcgcacaacctcctcctggctcatgccaaagtctggcatctctacaatacttctttccgtcccactcagggaggtcaggtgtccattgccctaagctctcactggatcaatcctcgaagaatgaccgaccacagcatcaaagaatgtcaaaaatctctggactttgtactaggttggtttgccaaacccgtatttattgatggtgactatcccgagagcatgaagaataacctttcatctattctgcctgattttactgaatctgagaaaaagttcatcaaaggaactgctgacttttttgctctttgctttggacccaccttgagttttcaacttttggaccctcacatgaagttccgccaattggaatctcccaacctgaggcaactgctttcctggattgaccttgaatttaaccatcctcaaatatttattgtggaaaatggctggtttgtctcagggaccaccaagagagatgatgccaaatatatgtattacctcaaaaagttcatcatggaaaccttaaaagccatcaagctggatggggtggatgtcatcgggtataccgcatggtccctcatggatggtttcgagtggcacagaggttacagcatcaggcgtggactcttctatgttgactttctaagccaggacaagatgttgttgccaaagtcttcagccttgttctaccaaaagctgatagagaaaaatggcttccctcctttacctgaaaatcagcccctagaagggacatttccctgtgactttgcttggggagttgttgacaactacattcaagtagataccactctgtctcagtttaccgacctgaatgtttacctgtgggatgtccaccacagtaaaaggcttattaaagtggatggggttgtgaccaagaagaggaaatcctactgtgttgactttgctgccatccagccccagatcgctttactccaggaaatgcacgttacacattttcgcttctccctggactgggccctgattctccctctgggtaaccagtcccaggtgaaccacaccatcctgcagtactatcgctgcatggccagcgagcttgtccgtgtcaacatcaccccagtggtggccctgtggcagcctatggccccgaaccaaggactgccgcgcctcctggccaggcagggcgcctgggagaacccctacactgccctggcctttgcagagtatgcccgactgtgctttcaagagctcggccatcacgtcaagctttggataacgatgaatgagccgtatacaaggaatatgacatacagtgctggccacaaccttctgaaggcccatgccctggcttggcatgtgtacaatgaaaagtttaggcatgctcagaatgggaaaatatccatagccttgcaggctgattggatagaacctgcctgccctttctcccaaaaggacaaagaggtggccgagagagttttggaatttgacattggctggctggctgagcccattttcggctctggagattatccatgggtgatgagggactggctgaaccaaagaaacaattttcttcttccttatttcactgaagatgaaaaaaagctaatccagggtacctttgactttttggctttaagccattataccaccatccttgtagactcagaaaaagaagatccaataaaatacaatgattacctagaagtgcaagaaatgaccgacatcacgtggctcaactcccccagtcaggtggcggtagtgccctgggggttgcgcaaagtgctgaactggctgaagttcaagtacggagacctccccatgtacataatatccaacggaatcgatgacgggctgcatgctgaggacgaccagctgagggtgtattatatgcagaattacataaacgaagctctcaaagcccacatactggatggtatcaatctttgcggatactttgcttattcgtttaacgaccgcacagctccgaggtttggcctctatcgttatgctgcagatcagtttgagcccaaggcatccatgaaacattacaggaaaattattgacagcaatggtttcccgggcccagaaactctggaaagattttgtccagaagaattcaccgtgtgtactgagtgcagtttttttcacacccgaaagtct

SEQ ID NO: 79 - DNA, 2844 bp, Homo sapiens
gagccgggcgacggcgcgcagacctgggcccgtgtctcgcggcctcctgcccccgaggccgcgggcctcttccagggcaccttccccgacggcttcctctgggccgtgggcagcgccgcctaccagaccgagggcggctggcagcagcacggcaagggtgcgtccatctgggacacgttcacccaccaccccctggcacccccgggagactcccggaacgccagtctgccgttgggcgccccgtcgccgctgcagcccgccaccggggacgtagccagcgacagctacaacaacgtcttccgcgacacggaggcgctgcgcgagctcggggtcactcactaccgcttctccatctcgtgggcgcgagtgctccccaatggcagcgcgggcgtccccaaccgcgaggggctgcgctactaccggcgcctgctggagcggctgcgggagctgggcgtgcagcccgtggtcaccctgtaccactgggacctgccccagcgcctgcaggacgcctacggcggctgggccaaccgcgccctggccgaccacttcagggattacgcggagctctgcttccgccacttcggcggtcaggtcaagtactggatcaccatcgacaacccctacgtggtggcctggcacggctacgccaccgggcgcctggcccccggcatccggggcagcccgcggctcgggtacctggtggcgcacaacctcctcctggctcatgccaaagtctggcatctctacaatacttctttccgtcccactcagggaggtcaggtgtccattgccctaagctctcactggatcaatcctcgaagaatgaccgaccacagcatcaaagaatgtcaaaaatctctggactttgtactaggttggtttgccaaacccgtatttattgatggtgactatcccgagagcatgaagaataacctttcatctattctgcctgattttactgaatctgagaaaaagttcatcaaaggaactgctgacttttttgctctttgctttggacccaccttgagttttcaacttttggaccctcacatgaagttccgccaattggaatctcccaacctgaggcaactgctttcctggattgaccttgaatttaaccatcctcaaatatttattgtggaaaatggctggtttgtctcagggaccaccaagagagatgatgccaaatatatgtattacctcaaaaagttcatcatggaaaccttaaaagccatcaagctggatggggtggatgtcatcgggtataccgcatggtccctcatggatggtttcgagtggcacagaggttacagcatcaggcgtggactcttctatgttgactttctaagccaggacaagatgttgttgccaaagtcttcagccttgttctaccaaaagctgatagagaaaaatggcttccctcctttacctgaaaatcagcccctagaagggacatttccctgtgactttgcttggggagttgttgacaactacattcaagtagataccactctgtctcagtttaccgacctgaatgtttacctgtgggatgtccaccacagtaaaaggcttattaaagtggatggggttgtgaccaagaagaggaaatcctactgtgttgactttgctgccatccagccccagatcgctttactccaggaaatgcacgttacacattttcgcttctccctggactgggccctgattctccctctgggtaaccagtcccaggtgaaccacaccatcctgcagtactatcgctgcatggccagcgagcttgtccgtgtcaacatcaccccagtggtggccctgtggcagcctatggccccgaaccaaggactgccgcgcctcctggccaggcagggcgcctgggagaacccctacactgccctggcctttgcagagtatgcccgactgtgctttcaagagctcggccatcacgtcaagctttggataacgatgaatgagccgtatacaaggaatatgacatacagtgctggccacaaccttctgaaggcccatgccctggcttggcatgtgtacaatgaaaagtttaggcatgctcagaatgggaaaatatccatagccttgcaggctgattggatagaacctgcctgccctttctcccaaaaggacaaagaggtggccgagagagttttggaatttgacattggctggctggctgagcccattttcggctctggagattatccatgggtgatgagggactggctgaaccaaagaaacaattttcttcttccttatttcactgaagatgaaaaaaagctaatccagggtacctttgactttttggctttaagccattataccaccatccttgtagactcagaaaaagaagatccaataaaatacaatgattacctagaagtgcaagaaatgaccgacatcacgtggctcaactcccccagtcaggtggcggtagtgccctgggggttgcgcaaagtgctgaactggctgaagttcaagtacggagacctccccatgtacataatatccaacggaatcgatgacgggctgcatgctgaggacgaccagctgagggtgtattatatgcagaattacataaacgaagctctcaaagcccacatactggatggtatcaatctttgcggatactttgcttattcgtttaacgaccgcacagctccgaggtttggcctctatcgttatgctgcagatcagtttgagcccaaggcatccatgaaacattacaggaaaattattgacagcaatggtttcccgggcccagaaactctggaaagattttgtccagaagaattcaccgtgtgtactgagtgcagtttttttcacacccgaaagtct

SEQ ID NO: 80 - DNA, 2838 bp, Homo sapiens
ggcgacggcgcgcagacctgggcccgtgtctcgcggcctcctgcccccgaggccgcgggcctcttccagggcaccttccccgacggcttcctctgggccgtgggcagcgccgcctaccagaccgagggcggctggcagcagcacggcaagggtgcgtccatctgggacacgttcacccaccaccccctggcacccccgggagactcccggaacgccagtctgccgttgggcgccccgtcgccgctgcagcccgccaccggggacgtagccagcgacagctacaacaacgtcttccgcgacacggaggcgctgcgcgagctcggggtcactcactaccgcttctccatctcgtgggcgcgagtgctccccaatggcagcgcgggcgtccccaaccgcgaggggctgcgctactaccggcgcctgctggagcggctgcgggagctgggcgtgcagcccgtggtcaccctgtaccactgggacctgccccagcgcctgcaggacgcctacggcggctgggccaaccgcgccctggccgaccacttcagggattacgcggagctctgcttccgccacttcggcggtcaggtcaagtactggatcaccatcgacaacccctacgtggtggcctggcacggctacgccaccgggcgcctggcccccggcatccggggcagcccgcggctcgggtacctggtggcgcacaacctcctcctggctcatgccaaagtctggcatctctacaatacttctttccgtcccactcagggaggtcaggtgtccattgccctaagctctcactggatcaatcctcgaagaatgaccgaccacagcatcaaagaatgtcaaaaatctctggactttgtactaggttggtttgccaaacccgtatttattgatggtgactatcccgagagcatgaagaataacctttcatctattctgcctgattttactgaatctgagaaaaagttcatcaaaggaactgctgacttttttgctctttgctttggacccaccttgagttttcaacttttggaccctcacatgaagttccgccaattggaatctcccaacctgaggcaactgctttcctggattgaccttgaatttaaccatcctcaaatatttattgtggaaaatggctggtttgtctcagggaccaccaagagagatgatgccaaatatatgtattacctcaaaaagttcatcatggaaaccttaaaagccatcaagctggatggggtggatgtcatcgggtataccgcatggtccctcatggatggtttcgagtggcacagaggttacagcatcaggcgtggactcttctatgttgactttctaagccaggacaagatgttgttgccaaagtcttcagccttgttctaccaaaagctgatagagaaaaatggcttccctcctttacctgaaaatcagcccctagaagggacatttccctgtgactttgcttggggagttgttgacaactacattcaagtagataccactctgtctcagtttaccgacctgaatgtttacctgtgggatgtccaccacagtaaaaggcttattaaagtggatggggttgtgaccaagaagaggaaatcctactgtgttgactttgctgccatccagccccagatcgctttactccaggaaatgcacgttacacattttcgcttctccctggactgggccctgattctccctctgggtaaccagtcccaggtgaaccacaccatcctgcagtactatcgctgcatggccagcgagcttgtccgtgtcaacatcaccccagtggtggccctgtggcagcctatggccccgaaccaaggactgccgcgcctcctggccaggcagggcgcctgggagaacccctacactgccctggcctttgcagagtatgcccgactgtgctttcaagagctcggccatcacgtcaagctttggataacgatgaatgagccgtatacaaggaatatgacatacagtgctggccacaaccttctgaaggcccatgccctggcttggcatgtgtacaatgaaaagtttaggcatgctcagaatgggaaaatatccatagccttgcaggctgattggatagaacctgcctgccctttctcccaaaaggacaaagaggtggccgagagagttttggaatttgacattggctggctggctgagcccattttcggctctggagattatccatgggtgatgagggactggctgaaccaaagaaacaattttcttcttccttatttcactgaagatgaaaaaaagctaatccagggtacctttgactttttggctttaagccattataccaccatccttgtagactcagaaaaagaagatccaataaaatacaatgattacctagaagtgcaagaaatgaccgacatcacgtggctcaactcccccagtcaggtggcggtagtgccctgggggttgcgcaaagtgctgaactggctgaagttcaagtacggagacctccccatgtacataatatccaacggaatcgatgacgggctgcatgctgaggacgaccagctgagggtgtattatatgcagaattacataaacgaagctctcaaagcccacatactggatggtatcaatctttgcggatactttgcttattcgtttaacgaccgcacagctccgaggtttggcctctatcgttatgctgcagatcagtttgagcccaaggcatccatgaaacattacaggaaaattattgacagcaatggtttcccgggcccagaaactctggaaagattttgtccagaagaattcaccgtgtgtactgagtgcagtttttttcacacccgaaagtct

SEQ ID NO: 81 - DNA, 2553 bp, Homo sapiens
aacgtcttccgcgacacggaggcgctgcgcgagctcggggtcactcactaccgcttctccatctcgtgggcgcgagtgctccccaatggcagcgcgggcgtccccaaccgcgaggggctgcgctactaccggcgcctgctggagcggctgcgggagctgggcgtgcagcccgtggtcaccctgtaccactgggacctgccccagcgcctgcaggacgcctacggcggctgggccaaccgcgccctggccgaccacttcagggattacgcggagctctgcttccgccacttcggcggtcaggtcaagtactggatcaccatcgacaacccctacgtggtggcctggcacggctacgccaccgggcgcctggcccccggcatccggggcagcccgcggctcgggtacctggtggcgcacaacctcctcctggctcatgccaaagtctggcatctctacaatacttctttccgtcccactcagggaggtcaggtgtccattgccctaagctctcactggatcaatcctcgaagaatgaccgaccacagcatcaaagaatgtcaaaaatctctggactttgtactaggttggtttgccaaacccgtatttattgatggtgactatcccgagagcatgaagaataacctttcatctattctgcctgattttactgaatctgagaaaaagttcatcaaaggaactgctgacttttttgctctttgctttggacccaccttgagttttcaacttttggaccctcacatgaagttccgccaattggaatctcccaacctgaggcaactgctttcctggattgaccttgaatttaaccatcctcaaatatttattgtggaaaatggctggtttgtctcagggaccaccaagagagatgatgccaaatatatgtattacctcaaaaagttcatcatggaaaccttaaaagccatcaagctggatggggtggatgtcatcgggtataccgcatggtccctcatggatggtttcgagtggcacagaggttacagcatcaggcgtggactcttctatgttgactttctaagccaggacaagatgttgttgccaaagtcttcagccttgttctaccaaaagctgatagagaaaaatggcttccctcctttacctgaaaatcagcccctagaagggacatttccctgtgactttgcttggggagttgttgacaactacattcaagtagataccactctgtctcagtttaccgacctgaatgtttacctgtgggatgtccaccacagtaaaaggcttattaaagtggatggggttgtgaccaagaagaggaaatcctactgtgttgactttgctgccatccagccccagatcgctttactccaggaaatgcacgttacacattttcgcttctccctggactgggccctgattctccctctgggtaaccagtcccaggtgaaccacaccatcctgcagtactatcgctgcatggccagcgagcttgtccgtgtcaacatcaccccagtggtggccctgtggcagcctatggccccgaaccaaggactgccgcgcctcctggccaggcagggcgcctgggagaacccctacactgccctggcctttgcagagtatgcccgactgtgctttcaagagctcggccatcacgtcaagctttggataacgatgaatgagccgtatacaaggaatatgacatacagtgctggccacaaccttctgaaggcccatgccctggcttggcatgtgtacaatgaaaagtttaggcatgctcagaatgggaaaatatccatagccttgcaggctgattggatagaacctgcctgccctttctcccaaaaggacaaagaggtggccgagagagttttggaatttgacattggctggctggctgagcccattttcggctctggagattatccatgggtgatgagggactggctgaaccaaagaaacaattttcttcttccttatttcactgaagatgaaaaaaagctaatccagggtacctttgactttttggctttaagccattataccaccatccttgtagactcagaaaaagaagatccaataaaatacaatgattacctagaagtgcaagaaatgaccgacatcacgtggctcaactcccccagtcaggtggcggtagtgccctgggggttgcgcaaagtgctgaactggctgaagttcaagtacggagacctccccatgtacataatatccaacggaatcgatgacgggctgcatgctgaggacgaccagctgagggtgtattatatgcagaattacataaacgaagctctcaaagcccacatactggatggtatcaatctttgcggatactttgcttattcgtttaacgaccgcacagctccgaggtttggcctctatcgttatgctgcagatcagtttgagcccaaggcatccatgaaacattacaggaaaattattgacagcaatggtttcccgggcccagaaactctggaaagattttgtccagaagaattcaccgtgtgtactgagtgcagtttttttcacacccgaaagtct

SEQ ID NO: 82 - DNA, 1648 bp, Homo sapiens
atgcccgccagcgccccgccgcgccgcccgcggccgccgccgccgtcgctgtcgctgctgctggtgctgctgggcctgggcggccgccgcctgcgtgcggagccgggcgacggcgcgcagacctgggcccgtgtctcgcggcctcctgcccccgaggccgcgggcctcttccagggcaccttccccgacggcttcctctgggccgtgggcagcgccgcctaccagaccgagggcggctggcagcagcacggcaagggtgcgtccatctgggacacgttcacccaccaccccctggcacccccgggagactcccggaacgccagtctgccgttgggcgccccgtcgccgctgcagcccgccaccggggacgtagccagcgacagctacaacaacgtcttccgcgacacggaggcgctgcgcgagctcggggtcactcactaccgcttctccatctcgtgggcgcgagtgctccccaatggcagcgcgggcgtccccaaccgcgaggggctgcgctactaccggcgcctgctggagcggctgcgggagctgggcgtgcagcccgtggtcaccctgtaccactgggacctgccccagcgcctgcaggacgcctacggcggctgggccaaccgcgccctggccgaccacttcagggattacgcggagctctgcttccgccacttcggcggtcaggtcaagtactggatcaccatcgacaacccctacgtggtggcctggcacggctacgccaccgggcgcctggcccccggcatccggggcagcccgcggctcgggtacctggtggcgcacaacctcctcctggctcatgccaaagtctggcatctctacaatacttctttccgtcccactcagggaggtcaggtgtccattgccctaagctctcactggatcaatcctcgaagaatgaccgaccacagcatcaaagaatgtcaaaaatctctggactttgtactaggttggtttgccaaacccgtatttattgatggtgactatcccgagagcatgaagaataacctttcatctattctgcctgattttactgaatctgagaaaaagttcatcaaaggaactgctgacttttttgctctttgctttggacccaccttgagttttcaacttttggaccctcacatgaagttccgccaattggaatctcccaacctgaggcaactgctttcctggattgaccttgaatttaaccatcctcaaatatttattgtggaaaatggctggtttgtctcagggaccaccaagagagatgatgccaaatatatgtattacctcaaaaagttcatcatggaaaccttaaaagccatcaagctggatggggtggatgtcatcgggtataccgcatggtccctcatggatggtttcgagtggcacagaggttacagcatcaggcgtggactcttctatgttgactttctaagccaggacaagatgttgttgccaaagtcttcagccttgttctaccaaaagctgatagagaaaaatggcttccctcctttacctgaaaatcagcccctagaagggacatttccctgtgactttgcttggggagttgttgacaactacattcaagtagataccactctgtctcagtttaccgacctgaatgtttacctgtggg

SEQ ID NO: 83 - DNA, 1564 bp, Homo sapiens
cgccgcctgcgtgcggagccgggcgacggcgcgcagacctgggcccgtgtctcgcggcctcctgcccccgaggccgcgggcctcttccagggcaccttccccgacggcttcctctgggccgtgggcagcgccgcctaccagaccgagggcggctggcagcagcacggcaagggtgcgtccatctgggacacgttcacccaccaccccctggcacccccgggagactcccggaacgccagtctgccgttgggcgccccgtcgccgctgcagcccgccaccggggacgtagccagcgacagctacaacaacgtcttccgcgacacggaggcgctgcgcgagctcggggtcactcactaccgcttctccatctcgtgggcgcgagtgctccccaatggcagcgcgggcgtccccaaccgcgaggggctgcgctactaccggcgcctgctggagcggctgcgggagctgggcgtgcagcccgtggtcaccctgtaccactgggacctgccccagcgcctgcaggacgcctacggcggctgggccaaccgcgccctggccgaccacttcagggattacgcggagctctgcttccgccacttcggcggtcaggtcaagtactggatcaccatcgacaacccctacgtggtggcctggcacggctacgccaccgggcgcctggcccccggcatccggggcagcccgcggctcgggtacctggtggcgcacaacctcctcctggctcatgccaaagtctggcatctctacaatacttctttccgtcccactcagggaggtcaggtgtccattgccctaagctctcactggatcaatcctcgaagaatgaccgaccacagcatcaaagaatgtcaaaaatctctggactttgtactaggttggtttgccaaacccgtatttattgatggtgactatcccgagagcatgaagaataacctttcatctattctgcctgattttactgaatctgagaaaaagttcatcaaaggaactgctgacttttttgctctttgctttggacccaccttgagttttcaacttttggaccctcacatgaagttccgccaattggaatctcccaacctgaggcaactgctttcctggattgaccttgaatttaaccatcctcaaatatttattgtggaaaatggctggtttgtctcagggaccaccaagagagatgatgccaaatatatgtattacctcaaaaagttcatcatggaaaccttaaaagccatcaagctggatggggtggatgtcatcgggtataccgcatggtccctcatggatggtttcgagtggcacagaggttacagcatcaggcgtggactcttctatgttgactttctaagccaggacaagatgttgttgccaaagtcttcagccttgttctaccaaaagctgatagagaaaaatggcttccctcctttacctgaaaatcagcccctagaagggacatttccctgtgactttgcttggggagttgttgacaactacattcaagtagataccactctgtctcagtttaccgacctgaatgtttacctgtggg

SEQ ID NO: 84 - DNA, 1549 bp, Homo sapiens
gagccgggcgacggcgcgcagacctgggcccgtgtctcgcggcctcctgcccccgaggccgcgggcctcttccagggcaccttccccgacggcttcctctgggccgtgggcagcgccgcctaccagaccgagggcggctggcagcagcacggcaagggtgcgtccatctgggacacgttcacccaccaccccctggcacccccgggagactcccggaacgccagtctgccgttgggcgccccgtcgccgctgcagcccgccaccggggacgtagccagcgacagctacaacaacgtcttccgcgacacggaggcgctgcgcgagctcggggtcactcactaccgcttctccatctcgtgggcgcgagtgctccccaatggcagcgcgggcgtccccaaccgcgaggggctgcgctactaccggcgcctgctggagcggctgcgggagctgggcgtgcagcccgtggtcaccctgtaccactgggacctgccccagcgcctgcaggacgcctacggcggctgggccaaccgcgccctggccgaccacttcagggattacgcggagctctgcttccgccacttcggcggtcaggtcaagtactggatcaccatcgacaacccctacgtggtggcctggcacggctacgccaccgggcgcctggcccccggcatccggggcagcccgcggctcgggtacctggtggcgcacaacctcctcctggctcatgccaaagtctggcatctctacaatacttctttccgtcccactcagggaggtcaggtgtccattgccctaagctctcactggatcaatcctcgaagaatgaccgaccacagcatcaaagaatgtcaaaaatctctggactttgtactaggttggtttgccaaacccgtatttattgatggtgactatcccgagagcatgaagaataacctttcatctattctgcctgattttactgaatctgagaaaaagttcatcaaaggaactgctgacttttttgctctttgctttggacccaccttgagttttcaacttttggaccctcacatgaagttccgccaattggaatctcccaacctgaggcaactgctttcctggattgaccttgaatttaaccatcctcaaatatttattgtggaaaatggctggtttgtctcagggaccaccaagagagatgatgccaaatatatgtattacctcaaaaagttcatcatggaaaccttaaaagccatcaagctggatggggtggatgtcatcgggtataccgcatggtccctcatggatggtttcgagtggcacagaggttacagcatcaggcgtggactcttctatgttgactttctaagccaggacaagatgttgttgccaaagtcttcagccttgttctaccaaaagctgatagagaaaaatggcttccctcctttacctgaaaatcagcccctagaagggacatttccctgtgactttgcttggggagttgttgacaactacattcaagtagataccactctgtctcagtttaccgacctgaatgtttacctgtggg

SEQ ID NO: 85 - DNA, 1543 bp, Homo sapiens
ggcgacggcgcgcagacctgggcccgtgtctcgcggcctcctgcccccgaggccgcgggcctcttccagggcaccttccccgacggcttcctctgggccgtgggcagcgccgcctaccagaccgagggcggctggcagcagcacggcaagggtgcgtccatctgggacacgttcacccaccaccccctggcacccccgggagactcccggaacgccagtctgccgttgggcgccccgtcgccgctgcagcccgccaccggggacgtagccagcgacagctacaacaacgtcttccgcgacacggaggcgctgcgcgagctcggggtcactcactaccgcttctccatctcgtgggcgcgagtgctccccaatggcagcgcgggcgtccccaaccgcgaggggctgcgctactaccggcgcctgctggagcggctgcgggagctgggcgtgcagcccgtggtcaccctgtaccactgggacctgccccagcgcctgcaggacgcctacggcggctgggccaaccgcgccctggccgaccacttcagggattacgcggagctctgcttccgccacttcggcggtcaggtcaagtactggatcaccatcgacaacccctacgtggtggcctggcacggctacgccaccgggcgcctggcccccggcatccggggcagcccgcggctcgggtacctggtggcgcacaacctcctcctggctcatgccaaagtctggcatctctacaatacttctttccgtcccactcagggaggtcaggtgtccattgccctaagctctcactggatcaatcctcgaagaatgaccgaccacagcatcaaagaatgtcaaaaatctctggactttgtactaggttggtttgccaaacccgtatttattgatggtgactatcccgagagcatgaagaataacctttcatctattctgcctgattttactgaatctgagaaaaagttcatcaaaggaactgctgacttttttgctctttgctttggacccaccttgagttttcaacttttggaccctcacatgaagttccgccaattggaatctcccaacctgaggcaactgctttcctggattgaccttgaatttaaccatcctcaaatatttattgtggaaaatggctggtttgtctcagggaccaccaagagagatgatgccaaatatatgtattacctcaaaaagttcatcatggaaaccttaaaagccatcaagctggatggggtggatgtcatcgggtataccgcatggtccctcatggatggtttcgagtggcacagaggttacagcatcaggcgtggactcttctatgttgactttctaagccaggacaagatgttgttgccaaagtcttcagccttgttctaccaaaagctgatagagaaaaatggcttccctcctttacctgaaaatcagcccctagaagggacatttccctgtgactttgcttggggagttgttgacaactacattcaagtagataccactctgtctcagtttaccgacctgaatgtttacctgtggg

SEQ ID NO: 86 - DNA, 1258 bp, Homo sapiens
aacgtcttccgcgacacggaggcgctgcgcgagctcggggtcactcactaccgcttctccatctcgtgggcgcgagtgctccccaatggcagcgcgggcgtccccaaccgcgaggggctgcgctactaccggcgcctgctggagcggctgcgggagctgggcgtgcagcccgtggtcaccctgtaccactgggacctgccccagcgcctgcaggacgcctacggcggctgggccaaccgcgccctggccgaccacttcagggattacgcggagctctgcttccgccacttcggcggtcaggtcaagtactggatcaccatcgacaacccctacgtggtggcctggcacggctacgccaccgggcgcctggcccccggcatccggggcagcccgcggctcgggtacctggtggcgcacaacctcctcctggctcatgccaaagtctggcatctctacaatacttctttccgtcccactcagggaggtcaggtgtccattgccctaagctctcactggatcaatcctcgaagaatgaccgaccacagcatcaaagaatgtcaaaaatctctggactttgtactaggttggtttgccaaacccgtatttattgatggtgactatcccgagagcatgaagaataacctttcatctattctgcctgattttactgaatctgagaaaaagttcatcaaaggaactgctgacttttttgctctttgctttggacccaccttgagttttcaacttttggaccctcacatgaagttccgccaattggaatctcccaacctgaggcaactgctttcctggattgaccttgaatttaaccatcctcaaatatttattgtggaaaatggctggtttgtctcagggaccaccaagagagatgatgccaaatatatgtattacctcaaaaagttcatcatggaaaccttaaaagccatcaagctggatggggtggatgtcatcgggtataccgcatggtccctcatggatggtttcgagtggcacagaggttacagcatcaggcgtggactcttctatgttgactttctaagccaggacaagatgttgttgccaaagtcttcagccttgttctaccaaaagctgatagagaaaaatggcttccctcctttacctgaaaatcagcccctagaagggacatttccctgtgactttgcttggggagttgttgacaactacattcaagtagataccactctgtctcagtttaccgacctgaatgtttacctgtggg

SEQ ID NO: 87 - DNA, 3654 bp, Artificial Sequence
  DNA_Native_SS_34_981_GS_IgG1_noCH1_Fc_Fusion
atgcctgcttccgccccgcctagaaggcctcggcctcctccccccagcctgtctctgctcttggtgctgctgggactgggtggacggcgccttcgcgcagagcctggcgacggcgcccagacctgggcccgggtgtcgaggccgccagcgcccgaggccgccggactgttccagggaaccttccctgatgggttcctctgggccgtgggctcagccgcataccagaccgaggggggctggcagcagcacggaaagggcgccagcatatgggacacgttcacccaccacccgctggctccgcccggggactccagaaacgcctccttgcccctcggtgctccttcgccactgcaacccgcaaccggcgacgtggccagcgattcatacaacaacgtgttccgggacaccgaggccctgagggaactgggagtgactcactaccgcttttcgatctcctgggcacgcgtgctcccgaacggatcggcgggagtgccgaatcgcgagggcctgcggtactaccgacggctgctggaaaggctcagagaactgggcgtgcagcctgtcgtgactctttaccactgggatctgccccaacggctgcaggatgcttacgggggatgggccaatagagccctggctgatcacttccgcgactacgccgaattgtgcttccggcacttcggtggccaagtcaagtactggattaccatcgacaacccatacgtcgtggcgtggcacggatacgcaaccggtcggctggcccctggtattcgcgggtccccgcggcttggatacctggtggcccacaacctgttgctcgcgcatgccaaagtctggcacctgtacaacacctcgttccggccgacccagggtggacaagtgtccatcgccctgtcgtcacactggatcaacccgcggagaatgaccgaccactccatcaaggaatgccagaagtccctcgatttcgtgttgggctggtttgccaagcctgtgtttattgacggagactaccccgagtccatgaagaacaacctgtcgtctatcctgcccgatttcactgaatccgagaaaaagtttatcaagggaaccgctgacttcttcgccctctgtttcggcccgaccttgtccttccaactgctcgatcctcatatgaagttccggcagctggaatcccctaaccttcgccagctgctgtcctggatcgacttggaattcaaccacccgcagatcttcattgtcgagaacggctggttcgtgtccgggaccaccaagcgcgacgacgccaagtacatgtattatctcaaaaagttcatcatggaaaccctcaaggccatcaaattggatggcgtggacgtgatcggatatacggcgtggagcctgatggacggtttcgagtggcaccgcggatacagcatccgcagaggactcttctacgtggacttcctgtcgcaagacaagatgctgctgcctaagagcagcgcgctgttctaccaaaagctcattgagaagaacgggttcccgcccctgccggagaaccagcctctggaagggaccttcccttgcgacttcgcctggggagtggtggacaactacatccaggtcgataccactctgagccagttcaccgacctgaacgtgtacctgtgggacgtgcatcacagcaagaggctcattaaggtcgacggagtggtcaccaagaagagaaagtcgtactgcgtggatttcgccgcaatccagccacagatcgccctgctgcaagagatgcacgtgacccatttccgcttctccctggattgggccctgattctcccgctggggaaccagtcgcaagtgaaccacactatcctgcaatactaccggtgcatggcttccgagctcgtccgcgtgaatatcacccccgtggtggcgctctggcagcctatggccccgaaccagggactgccacgactgctggccagacagggagcgtgggaaaacccgtacacagcactggcctttgcggagtacgcccggctgtgcttccaggaacttgggcatcacgtcaagctttggattactatgaacgaaccctacactaggaacatgacttactcagccggacataaccttctgaaggcacacgccctcgcttggcacgtgtacaacgaaaagttcagacacgctcagaacggaaagatttccatcgcgctgcaagcagactggatcgagcccgcctgccctttctcccaaaaagacaaggaagtggccgaacgggtgctggaattcgacatcggatggctggccgaacccatcttcggctccggcgattatccatgggtcatgcgggactggctcaaccagcgcaacaactttttgctgccatacttcaccgaagatgagaagaagctgatccagggcacctttgatttcctggcgctgagccactacactacgattctggtggacagcgaaaaggaggacccgattaagtacaacgactacctggaagtccaggaaatgaccgatattacttggctgaactcacctagccaagtggcggtggtgccttggggactgagaaaggtcctcaactggctcaaattcaaatacggagatctgcccatgtacatcatctccaatgggatcgacgacggcctgcatgctgaggacgatcagctccgcgtgtactatatgcagaactacattaacgaggcactgaaggcccatattctggacggcattaacctctgcggttattttgcctactcgttcaacgaccggactgccccccgcttcgggttgtaccgctacgccgcggatcagtttgagccaaaggcctccatgaagcattaccgcaagatcattgattccaatggatttccgggccccgaaaccctcgaacggttctgtccggaagagttcaccgtgtgtaccgagtgctccttctttcacacccgcaagagcgggggtggcggaagcggtggcggaggaagcgacaaaactcacacatgcccaccgtgcccagcacctgaactcctggggggaccgtcagtcttcctcttccccccaaaacccaaggacaccctcatgatctcccggacccctgaggtcacatgcgtggtggtggacgtgagccacgaagaccctgaggtcaagttcaactggtacgtggacggcgtggaggtgcataatgccaagacaaagccgcgggaggagcagtacaacagcacgtaccgggtggtcagcgtcctcaccgtcctgcaccaggactggctgaatggcaaggagtacaagtgcaaggtcagcaacaaagccctcccagcccccatcgagaaaaccatctccaaagccaaagggcagccccgagaaccacaggtgtacaccctgcccccatcccgggatgagctgaccaagaaccaggtcagcctgacctgcctggtcaaaggcttctatcccagcgacatcgccgtggagtgggagagcaatgggcagccggagaacaactacaagaccacgcctcccgtgctggactccgacggctccttcttcctctacagcaagctcaccgtggacaagagcaggtggcagcaggggaacgtcttctcatgctccgtgatgcatgaggctctgcacaaccactacacgcagaagtccctctccctgtctccgggtaaa

SEQ ID NO: 88 - DNA, 2358 bp, Artificial Sequence
  DNA_Native_Secreted_Iso2_SS_34_549_GS_IgG1_noCH1_Fc_Fusion
atgccagcttccgccccccctcggcggcctagacccccacctccctccctgtcgctgctgctggtgctgctcggtctgggcggacggagactcagggccgagcctggcgacggcgcacagacctgggcccggttctcacgccccccggccccggaagccgccggactgtttcagggaaccttccccgacggattcctgtgggccgtgggtagcgcggcgtaccagactgagggcggatggcagcagcacggaaagggagcctcaatttgggatactttcactcatcatcccctcgccccgccgggggattcgcggaacgcctccctccccctgggtgctcctagcccgctgcagccagccaccggcgacgtggcatccgacagctacaacaacgtgttccgggacaccgaggccctgagggaactgggagtgactcactaccgcttttcgatctcctgggcacgcgtgctcccgaacggatcggcgggagtgccgaatcgcgagggcctgcggtactaccgacggctgctggaaaggctcagagaactgggcgtgcagcctgtcgtgactctttaccactgggatctgccccaacggctgcaggatgcttacgggggatgggccaatagagccctggctgatcacttccgcgactacgccgaattgtgcttccggcacttcggtggccaagtcaagtactggattaccatcgacaacccatacgtcgtggcgtggcacggatacgcaaccggtcggctggcccctggtattcgcgggtccccgcggcttggatacctggtggcccacaacctgttgctcgcgcatgccaaagtctggcacctgtacaacacctcgttccggccgacccagggtggacaagtgtccatcgccctgtcgtcacactggatcaacccgcggagaatgaccgaccactccatcaaggaatgccagaagtccctcgatttcgtgttgggctggtttgccaagcctgtgtttattgacggagactaccccgagtccatgaagaacaacctgtcgtctatcctgcccgatttcactgaatccgagaaaaagtttatcaagggaaccgctgacttcttcgccctctgtttcggcccgaccttgtccttccaactgctcgatcctcatatgaagttccggcagctggaatcccctaaccttcgccagctgctgtcctggatcgacttggaattcaaccacccgcagatcttcattgtcgagaacggctggttcgtgtccgggaccaccaagcgcgacgacgccaagtacatgtattatctcaaaaagttcatcatggaaaccctcaaggccatcaaattggatggcgtggacgtgatcggatatacggcgtggagcctgatggacggtttcgagtggcaccgcggatacagcatccgcagaggactcttctacgtggacttcctgtcgcaagacaagatgctgctgcctaagagcagcgcgctgttctaccaaaagctcattgagaagaacgggttcccgcccctgccggagaaccagcctctggaagggaccttcccttgcgacttcgcctggggagtggtcgacaactacattcaagtgtcccagcttactaagccaatcagcagcctgactaagccataccacggcgggggagggtcgggcggaggcggatccgacaaaactcacacatgcccaccgtgcccagcacctgaactcctggggggaccgtcagtcttcctcttccccccaaaacccaaggacaccctcatgatctcccggacccctgaggtcacatgcgtggtggtggacgtgagccacgaagaccctgaggtcaagttcaactggtacgtggacggcgtggaggtgcataatgccaagacaaagccgcgggaggagcagtacaacagcacgtaccgggtggtcagcgtcctcaccgtcctgcaccaggactggctgaatggcaaggagtacaagtgcaaggtcagcaacaaagccctcccagcccccatcgagaaaaccatctccaaagccaaagggcagccccgagaaccacaggtgtacaccctgcccccatcccgggatgagctgaccaagaaccaggtcagcctgacctgcctggtcaaaggcttctatcccagcgacatcgccgtggagtgggagagcaatgggcagccggagaacaactacaagaccacgcctcccgtgctggactccgacggctccttcttcctctacagcaagctcaccgtggacaagagcaggtggcagcaggggaacgtcttctcatgctccgtgatgcatgaggctctgcacaaccactacacgcagaagtccctctccctgtctccgggtaaa

SEQ ID NO: 89 - DNA, 99 bp, Homo sapiens
atgcctgcttccgccccgcctagaaggcctcggcctcctccccccagcctgtctctgctcttggtgctgctgggactgggtggacggcgccttcgcgca

SEQ ID NO: 90 - DNA, 99 bp, Homo sapiens
atgccagcttccgccccccctcggcggcctagacccccacctccctccctgtcgctgctgctggtgctgctcggtctgggcggacggagactcagggcc

SEQ ID NO: 91 - DNA, 2844 bp, Homo sapiens
gagcctggcgacggcgcccagacctgggcccgggtgtcgaggccgccagcgcccgaggccgccggactgttccagggaaccttccctgatgggttcctctgggccgtgggctcagccgcataccagaccgaggggggctggcagcagcacggaaagggcgccagcatatgggacacgttcacccaccacccgctggctccgcccggggactccagaaacgcctccttgcccctcggtgctccttcgccactgcaacccgcaaccggcgacgtggccagcgattcatacaacaacgtgttccgggacaccgaggccctgagggaactgggagtgactcactaccgcttttcgatctcctgggcacgcgtgctcccgaacggatcggcgggagtgccgaatcgcgagggcctgcggtactaccgacggctgctggaaaggctcagagaactgggcgtgcagcctgtcgtgactctttaccactgggatctgccccaacggctgcaggatgcttacgggggatgggccaatagagccctggctgatcacttccgcgactacgccgaattgtgcttccggcacttcggtggccaagtcaagtactggattaccatcgacaacccatacgtcgtggcgtggcacggatacgcaaccggtcggctggcccctggtattcgcgggtccccgcggcttggatacctggtggcccacaacctgttgctcgcgcatgccaaagtctggcacctgtacaacacctcgttccggccgacccagggtggacaagtgtccatcgccctgtcgtcacactggatcaacccgcggagaatgaccgaccactccatcaaggaatgccagaagtccctcgatttcgtgttgggctggtttgccaagcctgtgtttattgacggagactaccccgagtccatgaagaacaacctgtcgtctatcctgcccgatttcactgaatccgagaaaaagtttatcaagggaaccgctgacttcttcgccctctgtttcggcccgaccttgtccttccaactgctcgatcctcatatgaagttccggcagctggaatcccctaaccttcgccagctgctgtcctggatcgacttggaattcaaccacccgcagatcttcattgtcgagaacggctggttcgtgtccgggaccaccaagcgcgacgacgccaagtacatgtattatctcaaaaagttcatcatggaaaccctcaaggccatcaaattggatggcgtggacgtgatcggatatacggcgtggagcctgatggacggtttcgagtggcaccgcggatacagcatccgcagaggactcttctacgtggacttcctgtcgcaagacaagatgctgctgcctaagagcagcgcgctgttctaccaaaagctcattgagaagaacgggttcccgcccctgccggagaaccagcctctggaagggaccttcccttgcgacttcgcctggggagtggtggacaactacatccaggtcgataccactctgagccagttcaccgacctgaacgtgtacctgtgggacgtgcatcacagcaagaggctcattaaggtcgacggagtggtcaccaagaagagaaagtcgtactgcgtggatttcgccgcaatccagccacagatcgccctgctgcaagagatgcacgtgacccatttccgcttctccctggattgggccctgattctcccgctggggaaccagtcgcaagtgaaccacactatcctgcaatactaccggtgcatggcttccgagctcgtccgcgtgaatatcacccccgtggtggcgctctggcagcctatggccccgaaccagggactgccacgactgctggccagacagggagcgtgggaaaacccgtacacagcactggcctttgcggagtacgcccggctgtgcttccaggaacttgggcatcacgtcaagctttggattactatgaacgaaccctacactaggaacatgacttactcagccggacataaccttctgaaggcacacgccctcgcttggcacgtgtacaacgaaaagttcagacacgctcagaacggaaagatttccatcgcgctgcaagcagactggatcgagcccgcctgccctttctcccaaaaagacaaggaagtggccgaacgggtgctggaattcgacatcggatggctggccgaacccatcttcggctccggcgattatccatgggtcatgcgggactggctcaaccagcgcaacaactttttgctgccatacttcaccgaagatgagaagaagctgatccagggcacctttgatttcctggcgctgagccactacactacgattctggtggacagcgaaaaggaggacccgattaagtacaacgactacctggaagtccaggaaatgaccgatattacttggctgaactcacctagccaagtggcggtggtgccttggggactgagaaaggtcctcaactggctcaaattcaaatacggagatctgcccatgtacatcatctccaatgggatcgacgacggcctgcatgctgaggacgatcagctccgcgtgtactatatgcagaactacattaacgaggcactgaaggcccatattctggacggcattaacctctgcggttattttgcctactcgttcaacgaccggactgccccccgcttcgggttgtaccgctacgccgcggatcagtttgagccaaaggcctccatgaagcattaccgcaagatcattgattccaatggatttccgggccccgaaaccctcgaacggttctgtccggaagagttcaccgtgtgtaccgagtgctccttctttcacacccgcaagagc

SEQ ID NO: 92 - DNA, 1548 bp, Homo sapiens
gagcctggcgacggcgcacagacctgggcccggttctcacgccccccggccccggaagccgccggactgtttcagggaaccttccccgacggattcctgtgggccgtgggtagcgcggcgtaccagactgagggcggatggcagcagcacggaaagggagcctcaatttgggatactttcactcatcatcccctcgccccgccgggggattcgcggaacgcctccctccccctgggtgctcctagcccgctgcagccagccaccggcgacgtggcatccgacagctacaacaacgtgttccgggacaccgaggccctgagggaactgggagtgactcactaccgcttttcgatctcctgggcacgcgtgctcccgaacggatcggcgggagtgccgaatcgcgagggcctgcggtactaccgacggctgctggaaaggctcagagaactgggcgtgcagcctgtcgtgactctttaccactgggatctgccccaacggctgcaggatgcttacgggggatgggccaatagagccctggctgatcacttccgcgactacgccgaattgtgcttccggcacttcggtggccaagtcaagtactggattaccatcgacaacccatacgtcgtggcgtggcacggatacgcaaccggtcggctggcccctggtattcgcgggtccccgcggcttggatacctggtggcccacaacctgttgctcgcgcatgccaaagtctggcacctgtacaacacctcgttccggccgacccagggtggacaagtgtccatcgccctgtcgtcacactggatcaacccgcggagaatgaccgaccactccatcaaggaatgccagaagtccctcgatttcgtgttgggctggtttgccaagcctgtgtttattgacggagactaccccgagtccatgaagaacaacctgtcgtctatcctgcccgatttcactgaatccgagaaaaagtttatcaagggaaccgctgacttcttcgccctctgtttcggcccgaccttgtccttccaactgctcgatcctcatatgaagttccggcagctggaatcccctaaccttcgccagctgctgtcctggatcgacttggaattcaaccacccgcagatcttcattgtcgagaacggctggttcgtgtccgggaccaccaagcgcgacgacgccaagtacatgtattatctcaaaaagttcatcatggaaaccctcaaggccatcaaattggatggcgtggacgtgatcggatatacggcgtggagcctgatggacggtttcgagtggcaccgcggatacagcatccgcagaggactcttctacgtggacttcctgtcgcaagacaagatgctgctgcctaagagcagcgcgctgttctaccaaaagctcattgagaagaacgggttcccgcccctgccggagaaccagcctctggaagggaccttcccttgcgacttcgcctggggagtggtcgacaactacattcaagtgtcccagcttactaagccaatcagcagcctgactaagccataccac

SEQ ID NO: 93 - DNA, 2838 bp, Homo sapiens
ggcgacggcgcccagacctgggcccgggtgtcgaggccgccagcgcccgaggccgccggactgttccagggaaccttccctgatgggttcctctgggccgtgggctcagccgcataccagaccgaggggggctggcagcagcacggaaagggcgccagcatatgggacacgttcacccaccacccgctggctccgcccggggactccagaaacgcctccttgcccctcggtgctccttcgccactgcaacccgcaaccggcgacgtggccagcgattcatacaacaacgtgttccgggacaccgaggccctgagggaactgggagtgactcactaccgcttttcgatctcctgggcacgcgtgctcccgaacggatcggcgggagtgccgaatcgcgagggcctgcggtactaccgacggctgctggaaaggctcagagaactgggcgtgcagcctgtcgtgactctttaccactgggatctgccccaacggctgcaggatgcttacgggggatgggccaatagagccctggctgatcacttccgcgactacgccgaattgtgcttccggcacttcggtggccaagtcaagtactggattaccatcgacaacccatacgtcgtggcgtggcacggatacgcaaccggtcggctggcccctggtattcgcgggtccccgcggcttggatacctggtggcccacaacctgttgctcgcgcatgccaaagtctggcacctgtacaacacctcgttccggccgacccagggtggacaagtgtccatcgccctgtcgtcacactggatcaacccgcggagaatgaccgaccactccatcaaggaatgccagaagtccctcgatttcgtgttgggctggtttgccaagcctgtgtttattgacggagactaccccgagtccatgaagaacaacctgtcgtctatcctgcccgatttcactgaatccgagaaaaagtttatcaagggaaccgctgacttcttcgccctctgtttcggcccgaccttgtccttccaactgctcgatcctcatatgaagttccggcagctggaatcccctaaccttcgccagctgctgtcctggatcgacttggaattcaaccacccgcagatcttcattgtcgagaacggctggttcgtgtccgggaccaccaagcgcgacgacgccaagtacatgtattatctcaaaaagttcatcatggaaaccctcaaggccatcaaattggatggcgtggacgtgatcggatatacggcgtggagcctgatggacggtttcgagtggcaccgcggatacagcatccgcagaggactcttctacgtggacttcctgtcgcaagacaagatgctgctgcctaagagcagcgcgctgttctaccaaaagctcattgagaagaacgggttcccgcccctgccggagaaccagcctctggaagggaccttcccttgcgacttcgcctggggagtggtggacaactacatccaggtcgataccactctgagccagttcaccgacctgaacgtgtacctgtgggacgtgcatcacagcaagaggctcattaaggtcgacggagtggtcaccaagaagagaaagtcgtactgcgtggatttcgccgcaatccagccacagatcgccctgctgcaagagatgcacgtgacccatttccgcttctccctggattgggccctgattctcccgctggggaaccagtcgcaagtgaaccacactatcctgcaatactaccggtgcatggcttccgagctcgtccgcgtgaatatcacccccgtggtggcgctctggcagcctatggccccgaaccagggactgccacgactgctggccagacagggagcgtgggaaaacccgtacacagcactggcctttgcggagtacgcccggctgtgcttccaggaacttgggcatcacgtcaagctttggattactatgaacgaaccctacactaggaacatgacttactcagccggacataaccttctgaaggcacacgccctcgcttggcacgtgtacaacgaaaagttcagacacgctcagaacggaaagatttccatcgcgctgcaagcagactggatcgagcccgcctgccctttctcccaaaaagacaaggaagtggccgaacgggtgctggaattcgacatcggatggctggccgaacccatcttcggctccggcgattatccatgggtcatgcgggactggctcaaccagcgcaacaactttttgctgccatacttcaccgaagatgagaagaagctgatccagggcacctttgatttcctggcgctgagccactacactacgattctggtggacagcgaaaaggaggacccgattaagtacaacgactacctggaagtccaggaaatgaccgatattacttggctgaactcacctagccaagtggcggtggtgccttggggactgagaaaggtcctcaactggctcaaattcaaatacggagatctgcccatgtacatcatctccaatgggatcgacgacggcctgcatgctgaggacgatcagctccgcgtgtactatatgcagaactacattaacgaggcactgaaggcccatattctggacggcattaacctctgcggttattttgcctactcgttcaacgaccggactgccccccgcttcgggttgtaccgctacgccgcggatcagtttgagccaaaggcctccatgaagcattaccgcaagatcattgattccaatggatttccgggccccgaaaccctcgaacggttctgtccggaagagttcaccgtgtgtaccgagtgctccttctttcacacccgcaagagc

SEQ ID NO: 94 - DNA, 1542 bp, Homo sapiens
ggcgacggcgcacagacctgggcccggttctcacgccccccggccccggaagccgccggactgtttcagggaaccttccccgacggattcctgtgggccgtgggtagcgcggcgtaccagactgagggcggatggcagcagcacggaaagggagcctcaatttgggatactttcactcatcatcccctcgccccgccgggggattcgcggaacgcctccctccccctgggtgctcctagcccgctgcagccagccaccggcgacgtggcatccgacagctacaacaacgtgttccgggacaccgaggccctgagggaactgggagtgactcactaccgcttttcgatctcctgggcacgcgtgctcccgaacggatcggcgggagtgccgaatcgcgagggcctgcggtactaccgacggctgctggaaaggctcagagaactgggcgtgcagcctgtcgtgactctttaccactgggatctgccccaacggctgcaggatgcttacgggggatgggccaatagagccctggctgatcacttccgcgactacgccgaattgtgcttccggcacttcggtggccaagtcaagtactggattaccatcgacaacccatacgtcgtggcgtggcacggatacgcaaccggtcggctggcccctggtattcgcgggtccccgcggcttggatacctggtggcccacaacctgttgctcgcgcatgccaaagtctggcacctgtacaacacctcgttccggccgacccagggtggacaagtgtccatcgccctgtcgtcacactggatcaacccgcggagaatgaccgaccactccatcaaggaatgccagaagtccctcgatttcgtgttgggctggtttgccaagcctgtgtttattgacggagactaccccgagtccatgaagaacaacctgtcgtctatcctgcccgatttcactgaatccgagaaaaagtttatcaagggaaccgctgacttcttcgccctctgtttcggcccgaccttgtccttccaactgctcgatcctcatatgaagttccggcagctggaatcccctaaccttcgccagctgctgtcctggatcgacttggaattcaaccacccgcagatcttcattgtcgagaacggctggttcgtgtccgggaccaccaagcgcgacgacgccaagtacatgtattatctcaaaaagttcatcatggaaaccctcaaggccatcaaattggatggcgtggacgtgatcggatatacggcgtggagcctgatggacggtttcgagtggcaccgcggatacagcatccgcagaggactcttctacgtggacttcctgtcgcaagacaagatgctgctgcctaagagcagcgcgctgttctaccaaaagctcattgagaagaacgggttcccgcccctgccggagaaccagcctctggaagggaccttcccttgcgacttcgcctggggagtggtcgacaactacattcaagtgtcccagcttactaagccaatcagcagcctgactaagccataccac

SEQ ID NO: 95 - DNA, 2553 bp, Homo sapiens
aacgtgttccgggacaccgaggccctgagggaactgggagtgactcactaccgcttttcgatctcctgggcacgcgtgctcccgaacggatcggcgggagtgccgaatcgcgagggcctgcggtactaccgacggctgctggaaaggctcagagaactgggcgtgcagcctgtcgtgactctttaccactgggatctgccccaacggctgcaggatgcttacgggggatgggccaatagagccctggctgatcacttccgcgactacgccgaattgtgcttccggcacttcggtggccaagtcaagtactggattaccatcgacaacccatacgtcgtggcgtggcacggatacgcaaccggtcggctggcccctggtattcgcgggtccccgcggcttggatacctggtggcccacaacctgttgctcgcgcatgccaaagtctggcacctgtacaacacctcgttccggccgacccagggtggacaagtgtccatcgccctgtcgtcacactggatcaacccgcggagaatgaccgaccactccatcaaggaatgccagaagtccctcgatttcgtgttgggctggtttgccaagcctgtgtttattgacggagactaccccgagtccatgaagaacaacctgtcgtctatcctgcccgatttcactgaatccgagaaaaagtttatcaagggaaccgctgacttcttcgccctctgtttcggcccgaccttgtccttccaactgctcgatcctcatatgaagttccggcagctggaatcccctaaccttcgccagctgctgtcctggatcgacttggaattcaaccacccgcagatcttcattgtcgagaacggctggttcgtgtccgggaccaccaagcgcgacgacgccaagtacatgtattatctcaaaaagttcatcatggaaaccctcaaggccatcaaattggatggcgtggacgtgatcggatatacggcgtggagcctgatggacggtttcgagtggcaccgcggatacagcatccgcagaggactcttctacgtggacttcctgtcgcaagacaagatgctgctgcctaagagcagcgcgctgttctaccaaaagctcattgagaagaacgggttcccgcccctgccggagaaccagcctctggaagggaccttcccttgcgacttcgcctggggagtggtggacaactacatccaggtcgataccactctgagccagttcaccgacctgaacgtgtacctgtgggacgtgcatcacagcaagaggctcattaaggtcgacggagtggtcaccaagaagagaaagtcgtactgcgtggatttcgccgcaatccagccacagatcgccctgctgcaagagatgcacgtgacccatttccgcttctccctggattgggccctgattctcccgctggggaaccagtcgcaagtgaaccacactatcctgcaatactaccggtgcatggcttccgagctcgtccgcgtgaatatcacccccgtggtggcgctctggcagcctatggccccgaaccagggactgccacgactgctggccagacagggagcgtgggaaaacccgtacacagcactggcctttgcggagtacgcccggctgtgcttccaggaacttgggcatcacgtcaagctttggattactatgaacgaaccctacactaggaacatgacttactcagccggacataaccttctgaaggcacacgccctcgcttggcacgtgtacaacgaaaagttcagacacgctcagaacggaaagatttccatcgcgctgcaagcagactggatcgagcccgcctgccctttctcccaaaaagacaaggaagtggccgaacgggtgctggaattcgacatcggatggctggccgaacccatcttcggctccggcgattatccatgggtcatgcgggactggctcaaccagcgcaacaactttttgctgccatacttcaccgaagatgagaagaagctgatccagggcacctttgatttcctggcgctgagccactacactacgattctggtggacagcgaaaaggaggacccgattaagtacaacgactacctggaagtccaggaaatgaccgatattacttggctgaactcacctagccaagtggcggtggtgccttggggactgagaaaggtcctcaactggctcaaattcaaatacggagatctgcccatgtacatcatctccaatgggatcgacgacggcctgcatgctgaggacgatcagctccgcgtgtactatatgcagaactacattaacgaggcactgaaggcccatattctggacggcattaacctctgcggttattttgcctactcgttcaacgaccggactgccccccgcttcgggttgtaccgctacgccgcggatcagtttgagccaaaggcctccatgaagcattaccgcaagatcattgattccaatggatttccgggccccgaaaccctcgaacggttctgtccggaagagttcaccgtgtgtaccgagtgctccttctttcacacccgcaagagc

SEQ ID NO: 96 - DNA, 1257 bp, Homo sapiens
aacgtgttccgggacaccgaggccctgagggaactgggagtgactcactaccgcttttcgatctcctgggcacgcgtgctcccgaacggatcggcgggagtgccgaatcgcgagggcctgcggtactaccgacggctgctggaaaggctcagagaactgggcgtgcagcctgtcgtgactctttaccactgggatctgccccaacggctgcaggatgcttacgggggatgggccaatagagccctggctgatcacttccgcgactacgccgaattgtgcttccggcacttcggtggccaagtcaagtactggattaccatcgacaacccatacgtcgtggcgtggcacggatacgcaaccggtcggctggcccctggtattcgcgggtccccgcggcttggatacctggtggcccacaacctgttgctcgcgcatgccaaagtctggcacctgtacaacacctcgttccggccgacccagggtggacaagtgtccatcgccctgtcgtcacactggatcaacccgcggagaatgaccgaccactccatcaaggaatgccagaagtccctcgatttcgtgttgggctggtttgccaagcctgtgtttattgacggagactaccccgagtccatgaagaacaacctgtcgtctatcctgcccgatttcactgaatccgagaaaaagtttatcaagggaaccgctgacttcttcgccctctgtttcggcccgaccttgtccttccaactgctcgatcctcatatgaagttccggcagctggaatcccctaaccttcgccagctgctgtcctggatcgacttggaattcaaccacccgcagatcttcattgtcgagaacggctggttcgtgtccgggaccaccaagcgcgacgacgccaagtacatgtattatctcaaaaagttcatcatggaaaccctcaaggccatcaaattggatggcgtggacgtgatcggatatacggcgtggagcctgatggacggtttcgagtggcaccgcggatacagcatccgcagaggactcttctacgtggacttcctgtcgcaagacaagatgctgctgcctaagagcagcgcgctgttctaccaaaagctcattgagaagaacgggttcccgcccctgccggagaaccagcctctggaagggaccttcccttgcgacttcgcctggggagtggtcgacaactacattcaagtgtcccagcttactaagccaatcagcagcctgactaagccataccac

SEQ ID NO: 97 - DNA, 30 bp, Artificial Sequence
  DNA_GS_linker1
gggggtggcggaagcggtggcggaggaagc

SEQ ID NO: 98 - DNA, 30 bp, Artificial Sequence
  DNA_GS_Linker_iso2
ggcgggggagggtcgggcggaggcggatcc

SEQ ID NO: 99 - DNA, 681 bp, Artificial Sequence
  DNA_ IgG1_noCH1_Fc_Fusion
gacaaaactcacacatgcccaccgtgcccagcacctgaactcctggggggaccgtcagtcttcctcttccccccaaaacccaaggacaccctcatgatctcccggacccctgaggtcacatgcgtggtggtggacgtgagccacgaagaccctgaggtcaagttcaactggtacgtggacggcgtggaggtgcataatgccaagacaaagccgcgggaggagcagtacaacagcacgtaccgggtggtcagcgtcctcaccgtcctgcaccaggactggctgaatggcaaggagtacaagtgcaaggtcagcaacaaagccctcccagcccccatcgagaaaaccatctccaaagccaaagggcagccccgagaaccacaggtgtacaccctgcccccatcccgggatgagctgaccaagaaccaggtcagcctgacctgcctggtcaaaggcttctatcccagcgacatcgccgtggagtgggagagcaatgggcagccggagaacaactacaagaccacgcctcccgtgctggactccgacggctccttcttcctctacagcaagctcaccgtggacaagagcaggtggcagcaggggaacgtcttctcatgctccgtgatgcatgaggctctgcacaaccactacacgcagaagtccctctccctgtctccgggtaaa

SEQ ID NO: 100 - DNA, 57 bp, Artificial Sequence
  DNA_Synthetic_SS
atggctcggctgacagtcctggccctgctggctggtctgctggcgtcctcgagggcc

SEQ ID NO: 101 - DNA, 120 bp, Artificial Sequence
  DNA_TwinStrep_tag
ggcggagaaaacctttacttccaatcctctgcctggagccacccccagtttgaaaagggcggcggctcagggggcggatccgggggatcatccgcctggtcccatccgcaattcgagaag

SEQ ID NO: 102 - protein, 32 aa, Artificial Sequence
  Protein_TwinStrep_Tag_2
SSAWSHPQFEKGGGSGGGSGGSSAWSHPQFEK

SEQ ID NO: 103 - protein, 29 aa, Artificial Sequence
  Protein_TwinStrep_Tag_3
WSHPQFEKGGGSGGGSGGSSAWSHPQFEK

SEQ ID NO: 104 - protein, 8 aa, Artificial Sequence
  Strep_Tag
WSHPQFEK

SEQ ID NO: 105 - protein, 11 aa, Artificial Sequence
  Protein_Strep_Tag_Linker
GGENLYFQSSA

SEQ ID NO: 106 - protein, 8 aa, Artificial Sequence
  Protein_Strep_Tag_Linker_2
GGENLYFQ

SEQ ID NO: 107 - protein, 516 aa, Homo sapiens
EPGDGAQTWARVSRPPAPEAAGLFQGTFPDGFLWAVGSAAYQTEGGWQQHGKGASIWDTFTHHPLAPPGDSRNASLPLGAPSPLQPATGDVASDSYNNVFRDTEALRELGVTHYRFSISWARVLPNGSAGVPNREGLRYYRRLLERLRELGVQPVVTLYHWDLPQRLQDAYGGWANRALADHFRDYAELCFRHFGGQVKYWITIDNPYVVAWHGYATGRLAPGIRGSPRLGYLVAHNLLLAHAKVWHLYNTSFRPTQGGQVSIALSSHWINPRRMTDHSIKECQKSLDFVLGWFAKPVFIDGDYPESMKNNLSSILPDFTESEKKFIKGTADFFALCFGPTLSFQLLDPHMKFRQLESPNLRQLLSWIDLEFNHPQIFIVENGWFVSGTTKRDDAKYMYYLKKFIMETLKAIKLDGVDVIGYTAWSLMDGFEWHRGYSIRRGLFYVDFLSQDKMLLPKSSALFYQKLIEKNGFPPLPENQPLEGTFPCDFAWGVVDNYIQVSQLTKPISSLTKPYH

SEQ ID NO: 108 - protein, 516 aa, Homo sapiens
EPGDGAQTWARVSRPPAPEAAGLFQGTFPDGFLWAVGSAAYQTEGGWQQHGKGASIWDTFTHHPLAPPGDSRNASLPLGAPSPLQPATGDVASDSYNNVFRDTEALRELGVTHYRFSISWARVLPNGSAGVPNREGLRYYRRLLERLRELGVQPVVTLYHWDLPQRLQDAYGGWANRALADHFRDYAELCFRHFGGQVKYWITIDNPYVVAWHGYATGRLAPGIRGSPRLGYLVAHNLLLAHAKVWHLYNTSFRPTQGGQVSIALSSHWINPRRMTDHSIKECQKSLDFVLGWFAKPVFIDGDYPESMKNNLSSILPDFTESEKKFIKGTADFFALSFGPTLSFQLLDPHMKFRQLESPNLRQLLSWIDLEFNHPQIFIVENGWFVSGTTKRDDAKYMYYLKKFIMETLKAIKLDGVDVIGYTAWSLMDGFEWHRGYSIRRGLFYVDFLSQDKMLLPKSSALFYQKLIEKNGFPPLPENQPLEGTFPCDFAWGVVDNYIQVSQLTKPISSLTKPYH

SEQ ID NO: 109 - protein, 516 aa, Homo sapiens
EPGDGAQTWARFSRPPAPEAAGLFQGTFPDGFLWAVGSAAYQTEGGWQQHGKGASIWDTFTHHPLAPPGDSRNASLPLGAPSPLQPATGDVASDSYNNVFRDTEALRELGVTHYRFSISWARVLPNGSAGVPNREGLRYYRRLLERLRELGVQPVVTLYHWDLPQRLQDAYGGWANRALADHFRDYAELCFRHFGGQVKYWITIDNPYVVAWHGYATGRLAPGIRGSPRLGYLVAHNLLLAHAKVWHLYNTSFRPTQGGQVSIALSSHWINPRRMTDHSIKECQKSLDFVLGWFAKPVFIDGDYPESMKNNLSSILPDFTESEKKFIKGTADFFALCFGPTLSFQLLDPHMKFRQLESPNLRQLLSWIDLEFNHPQIFIVENGWFVSGTTKRDDAKYMYYLKKFIMETLKAIKLDGVDVIGYTAWSLMDGFEWHRGYSIRRGLFYVDFLSQDKMLLPKSSALFYQKLIEKNGFPPLPENQPLEGTFPCDFAWGVVDNYIQVSQLTKPISSLTKPYH

SEQ ID NO: 110 - protein, 516 aa, Homo sapiens
EPGDGAQTWARFSRPPAPEAAGLFQGTFPDGFLWAVGSAAYQTEGGWQQHGKGASIWDTFTHHPLAPPGDSRNASLPLGAPSPLQPATGDVASDSYNNVFRDTEALRELGVTHYRFSISWARVLPNGSAGVPNREGLRYYRRLLERLRELGVQPVVTLYHWDLPQRLQDAYGGWANRALADHFRDYAELCFRHFGGQVKYWITIDNPYVVAWHGYATGRLAPGIRGSPRLGYLVAHNLLLAHAKVWHLYNTSFRPTQGGQVSIALSSHWINPRRMTDHSIKECQKSLDFVLGWFAKPVFIDGDYPESMKNNLSSILPDFTESEKKFIKGTADFFALSFGPTLSFQLLDPHMKFRQLESPNLRQLLSWIDLEFNHPQIFIVENGWFVSGTTKRDDAKYMYYLKKFIMETLKAIKLDGVDVIGYTAWSLMDGFEWHRGYSIRRGLFYVDFLSQDKMLLPKSSALFYQKLIEKNGFPPLPENQPLEGTFPCDFAWGVVDNYIQVSQLTKPISSLTKPYH

SEQ ID NO: 111 - protein, 864 aa, Canis familiaris
MATCILQMRFLRLGKILFHSSPQSTGGSGGTRGPRAPAQLRTQRGTDKLVAKSELKAKTAHRALADHFRDYAELCFRHFCGQVKYWITIDNPYVVAWHGYATGRLAPGVRGSPRLGYLVAHNLLLAHAKIWHLYNTSFRPTQGGQVSIALSSHWINPRRMTDHSIKECQKSLDFVLGWFAKPIFIDGDYPESMKNNLSSLLPVFTESEKKFIKGTADFFALSFGPTLSFQLLDPHMKFHQLESPSLRQLLSWIDLEYNHPQIFIVENGWFVSGTTKRDDAKYMYYLKKFIMETLKAIRLDGVDVIGYTAWSLMDGFEWHRGYSIRRGLFYVDFLSQDKKLLPKSSALFYQKLIEKNGFPPLPENQPLEGTFPCDFAWGIVDNYIQVDTTLSQFTDPNVYLWDVHHSKRLIKVDGLRAKKRKPYCVDFAAIGPQVALLQEMHVSHFHFSLDWALLLPLGNQSRVNHAALHYYGCVASELLRANITPVVALWRPAAAHQGLPGPLAQRGAWENPRTALAFAEYARLCFRALGRHVKVWITLREPPTRNLTLRAGHNLLRAHALAWRVYDEQFRGSQQGKVSIALQADWVEPACPSSQKDREVAERVLEFDVGWLAEPIFGSGDYPRLMRDWLTRRDHSLLPYFTDEEKRLIRGSFDFLALSHYTTILVDWEKEDPVKYNDYLEVQEMTDITWLNSPSQVAVVPWGLRKVLNWLKFKYGDLPMYIVSNGIDDDPRAAQDSLRVYYMQNYVNEALKAYVLDGINLCGYFAYSFNDRTAPKFGLYHYAANQFEPKPSVKHYRKIIDNNGFPGPETLGRFCPEEFTLCTECSFFHTRKSLLAFIAFLLFAFIISLSLIFYYSRKGRRSYK

SEQ ID NO: 112 - protein, 705 aa, Felis catus
MTDHSIKECQKSLDFVLGWFAKPIFIDGDYPESMKNNLSHLLPDFTEAEKKFIKGTADFFALSFGPTLSFQLLDPHMKFRQLESPSLRQLLSWIDLEYNHPQIFIVENGWFVSGTTKRDDAKYMYYLKKFVMETLKAIRLDGVDVIGYTAWSLMDGFEWHRGYSIRRGLFYVDFLSQDKKLLPKSSALFYQKLIEKNGFPPLPENQPLEGTFPCDFAWGIVDNYIQVDTTLSQFTDPNVYLWDVHHSKRLIKVDGVVTKKRKSYCVDFAAIRPQIALLQEMHVSHFHFSLDWALILPLGNQSQVNHTVLDYYRCVVSELVRANITPVVALWRPAAPHQGLPRPLAKHGAWENPHTASAFAEYARLCFKDLGHHVKFWITMGEPYTRNMTYSAGHNLLKAHALAWRVYDENFRGSQKGKISIALQADWIEPACPFSQKDKEVAERVLEFDIGWLAEPIFGSGDYPRVMRDWLTQRNNFLLPYFTEDEKKLIRGSFDFLAVSHYTTILVDWEKEDPMKYNDYLEVQEMTDITWLNSPSQVAVVPWGLRKILNWLKLKYGDLPMYIISNGIDDDPQAAQDKLRVYYMQNYVNEALKAYVLDGVNLCGYFAYSFNDRTAPKFGFYHYAANQFEPKPSMKHYRKMIDSNGFSGPDTLGRFCPEEFTLCTECGFFHTRKSLLAFIAFLLFAFIISLSLIFYYSKKGKRSYK

SEQ ID NO: 113 - protein, 705 aa, Felis catus; identical to SEQ ID NO: 112

SEQ ID NO: 114 - protein, 754 aa, Felis catus
MRDLCYITWSRGTVQAHAKIWHLYNTSFRPTQGGQVSIALSSHWINPRRMTDHSIKECQKSLDFVLGWFAKPIFIDGDYPESMKNNLSHLLPDFTEAEKKFIKGTADFFALSFGPTLSFQLLDPHMKFRQLESPSLRQLLSWIDLEYNHPQIFIVENGWFVSGTTKRDDAKYMYYLKKFVMETLKAIRLDGVDVIGYTAWSLMDGFEWHRGYSIRRGLFYVDFLSQDKKLLPKSSALFYQKLIEKNGFPPLPENQPLEGTFPCDFAWGIVDNYIQVDTTLSQFTDPNVYLWDVHHSKRLIKVDGVVTKKRKSYCVDFAAIRPQIALLQEMHVSHFHFSLDWALILPLGNQSQVNHTVLDYYRCVVSELVRANITPVVALWRPAAPHQGLPRPLAKHGAWENPHTASAFAEYARLCFKDLGHHVKFWITMGEPYTRNMTYSAGHNLLKAHALAWRVYDENFRGSQKGKISIALQADWIEPACPFSQKDKEVAERVLEFDIGWLAEPIFGSGDYPRVMRDWLTQRNNFLLPYFTEDEKKLIRGSFDFLAVSHYTTILVDWEKEDPMKYNDYLEVQEMTDITWLNSPSQVAVVPWGLRKILNWLKLKYGDLPMYIISNGIDDDPQAAQDKLRVYYMQNYVNEALKAYVLDGVNLCGYFAYSFNDRTAPKFGFYHYAANQFEPKPSMKHYRKMIDSNGFSGPDTLGRFCPEEFTLCTECGFFHTRKSLLAFIAFLLFAFIISLSLIFYYSKKGKRSYK

SEQ ID NO: 115 - protein, 1012 aa, Sus scrofa; identical to SEQ ID NO: 1

SEQ ID NO: 116 - protein, 1013 aa, Bos taurus
MPARAPPRRLRAFPPPPPPLWLLLLALGGRPLRAEPGDGAQTWARFARPPTPEAAGLLHDTFPDGFLWAVGSAAYQTEGGWQQHGKGASIWDTFTHRPPAPPGDPSAAGWPSGAPSPPPPATGDVASDGYNNVFRDTEGLRELGVTHYRFSISWARVLPNGSASAPNREGLRYYRRLLERLRELGVQPVVTLYHWDLPQRLQDAYGGWANRALADHFRDYAELCFRHFGGQVKYWITIDNPYVVAWHGYATGRLAPGVRGSPRLGYLVAHNLLLAHAKIWHLYDTSFRPTQGGQVSIALSSHWISPRRMTEHSIQECQKSLDFVLGWFAKPIFIDGDYPESMKNNLSSLLPDFTESEKKFIKGTADFFALSFGPTLSFQLLDPQMKFRQLESPSLRQLLSWIDLEYNHPQIFIVENGWFVSGTTKRDDAKYMYYLKKFIMETLKAIRLDGVDVIGYTAWSLMDGFEWHRGYSIRRGLFYVDFLSQDKKLLPKSSALFYQKLIENNGFPPLPENQPLEGTFPCDFAWGVVDNCIQVDTTLSQFIDPNVYLWDVHRSKRLIKVDGVLTKTRKSYCVDFAAIRPQIALLQEMHVTHFHFSLDWALILPLGNRSQVNRTVLGFYRCVASELVRANITPVVALWRPAAPHQGLPAPLARHGAWENPHTALAFAEYASLCFQDLGRHVKFWITMHEPSTRNMTYSAGHNLLKAHALAWRTYDERFRRSQKGKISIALQADWIEPACPFSPEDREVAERVLEFDIGWLAEPIFGSGDYPRVMRDWLNQRNNFLLPYFTDEEKKLIRGSFDFLALSHYTTILVDWEKEDPIKYNDYLAVQEMTDITWLNSPSQVAVVPWGLRKVLNWLKAKYGDLPMYIISNGIDDDPHAAQDNLRVYYMQTYVNEALKAYILDGINLCGYFAYSFNDRTAPKFGLYRYAANQFEPKPSMKHYRKIIDNNGFPGPETLGRFCPEEFTLCTECSFFHTRKSLLAFIAFLLFAFVISLSLIFYYSKKGRRGYK

SEQ ID NO: 117 - protein, 1010 aa, Ovis aries
  misc_feature (63)..(63): Xaa can be any naturally occurring amino acid
MPARARRALGPSRLPAAAARLWLLLPGLGRPALRARPGDGAQTWARFARPPNPRGRGLLHDTXPDGFSWAVGSAAYQTEGGWQQHGKGASHLGHVHHRPPAPPGDPSRPGWPSGAPSPPPRPPSGDVASDGYNNVFRDTEGLRELGVTHYRFSISWARVLPNGSASAPNREGLRYYRRLLERLRELGVQPVVTLSHWALPQLLQDAYGGWANRALADHFRDYAELCFRHFGGQVKYWITIDNPYVVAWHGYATGRLAPGGRGSPRLHNLLLAHAKIWHLYDTSFRPTQGGQVSIALSSHWISPRRMTEHSIKECQKSLDFVLGWFAKPIFIDGDYPESMKNNLSSLLPDFTESEKKFIKGTADFFALSFGPTLSFQLLDPQMKFRQLESPSLRQLLSWIDLEYNHPQIFIVENGWFVSGTTKRDDAKYMYYLKKFIMETLKAIRLDGVDVIGYTAWSLMDGFEWHRGYSIRRGLFYVDFLSQDKKLLPKSSALFYQKLIENNGFPPLPENQPLEGTFPCDFAWGVVDNCIQVDTTLSQFIDPNVYLWDVHRSKRLIKVDGVLTKTRKSYCVDFAAIRPQIALLQEMHVTHFHFSLDWALILPLGNRSQVNRTVLGFYRCVASELVRANITPVVALWRPAAPHQGLPAPLARHGAWENPHTALAFAEYASLCFQDLGRHVKFWITMHEPSTRNMTYSAGHNLLKAHALAWRTYDERFRRSQKGKISIALQADWIEPACPFSPEDREVAERVLEFDIGWLAEPIFGSGDYPRVMRDWLNQRNNFLLPYFTDEEKKLIRGSFDFLALSHYTTILVDWEKEDPIKYNDYLAVQEMTDITWLNSPSQVAVVPWGLRKVLNWLKAKYGDLPMYIISNGIDDDPHAAQDNLRVYYMQNYVNEALKAYILDGINLCGYFAYSFNDRTAPKFGLYRYAANQFEPKPSMKHYRKIIDNNGFPGPETLGRFCPEEFTLCTECSFFHARKSLLAFIAFLLFAFVISLSLIFYYSKKGRRGYK

SEQ ID NO: 118 - protein, 983 aa, Equus caballus
  misc_feature (38)..(38): Xaa can be any naturally occurring amino acid
MSRKTRRAWGSPVHLSARSPAPEPRGLLTASFPDGFLXAVSSAAYQTEGGWRQHGKGASIWDTFTHHPPATPGGPQLSGLPSGGPSPSPLATGDVASDGYNNVFRDTEGLRELGVTHYRFSISWARVLPNGSAGAPNREGLRYYRRLLERLRELGVQPVVTLYHWDLPQRLQDAYGGWANRALADHFRDYAELCFRHFGGQVKYWITIDNPYVVAWHGYATGRLAPGVRGSPQLGYLVAHNLLLAHAKIWHLYNTSFRPTQGGQVSIALSSHWINPRRMTDHSIKECQKSLDFVLGWFAKPIFIDGDYPETMKNNLSSLLPDFTESEKKFIKGTADFFALSFGPTLSFQLLDPHMKFRQLESPSLRQLLSWIDLEYNHPQIFIVENGWFVSGTTKRDDAKYMYYLKKFIMETLKAIRLDGVDVIGYTAWSLMDGFEWHRGYSIRRGLFYVDFLSQDKKLLPKSSALFYQKLIEKNGFPPLPENQPLEGTFPCDFAWGVVDNYIQVDTTLSQFTDPNVYLWDVHHSKRLIKVDGLVAKKRTSYCVDFAAIRPQIALLQEMHVSHFHFALDWPLILPLGNQSQVNRTGLHYYRCVVSELVRANITPVVALWRPSPQHQGLPRLLAKHGAWENPHTALAFAEYARLCFQELGHHVKFWITMSEPYTRNMTYSAGHNLLKAHALAWRVYDDKFRHAQKGKISIALQADWIEPACPFSQQDKEGAERVLEFDIGWLAEPIFGSGDYPPVMRDWLNQRNNFLLPYFSEEEKKLIRGSFDFLALSHYTTILVDWEKEDPMKYNDYLEVQEMTDITWLNSPSQVAVVPWGLRKVLNWLKSKYGDLPMYIIANGIDDDPQEAQDRLRVYYMQNYVNEALKAYVLDGINLCGYFAYSFNDRTAPKFGLYRYAANQFEPKPSMKHYRKIIDNNGFPGPKTLGRFCPEEFTLCTECSFFHTRKSLLAFIAFLLFAFIISLSLIFYYSKKGRRNYK

SEQ ID NO: 119 - protein, 1005 aa, Oryctolagus cuniculus
MPVRARPLQLRLRLLLLALVGRLLRAEPGDGAQTWVRFARPPVPDAAGLLHDTFPDGFLWAVGSAAYQTEGGWQQHGKGESIWDTFTHHPPAPLGDLSITPLPSGTPSAPPAATGDVASDGYNNVLRDTEGLRELGVTHYRFSISWARVLPNGSASAPNREGLRYYRRLLERLRELGVQPVVTLYHWDLPQRLQDAYGGWANPSLADHFRDYAELCFRHFGSQVKYWITIDNPYVVAWHGYATGRLAPGIRGGARLGYLVAHNLLLAHAKIWHLYNTSFRPTQGGQVSIALGSHWIIPRRRTDHNIKECQKSLDFVLGWFARPIFIDGDYPESMKNNLSSLLPDFTEAEKKFIKGTADFFALSFGPTLSFQLLDPQMKFRQLESPSLRQLLSWIALEYNHPQIFIVENGWFVSGTTKRDDAKYMYYLKKFIMETLKAIRLDGVDVIGYTAWSLMDGFEWHRGYNIRRGLFYVDFLSQDKKLLPKSSALFYQKLIEKNGFPPLPENQPLEGTFPCDFAWGVVDNYIQVDTTLSQFTDPNVYLWDVHHSKRLIKLDGVVSRKRKSYCVDFAAIRSQIVLLQETHVTHFHFSLDWALVLPLGNQSQVNRTVLRYYRCVVEELVRANITPVVALWQPAAPHQGLPQPLAQQGAWENPHTVLAFVEYARLCFMELGHRIKFWITMNEPNTRNMTYRAGHHLLKAHALVWREYDGKFRPAQKGKVSIALQADWIEPACPFSQKDKEVAERVLEFDIGWLAEPIFGSGDYPRVMRDWLNQRNNFLLPYFTEEERQLVRGSFDFLALSHYTTILVDWEKEDPTKYNDYLEVQEMTDITWLNSPGQVAVVPWGLRKVLNWLRLKYGDLPMYVIANGIDDDLQAEQDQLRVYYIQNYVNEALKAYMLDGINLCGYFAYSLNDRSAPKFGLYRYAANQFEPKPSMKHYRRIIDNNGFPSSETLEEFCPEELSKCIECSFFHKRKSLLAFIAFLFFAFIISLSLIFYYSKKGRRSYK

SEQ ID NO: 120 - protein, 1013 aa, Capra aegagrus
MPARAPPRRLRALPPPPPPLWLLLLALGGRPLRAEPGDGAQTWARFARPPTPEAAGLLHDTFPDGFLWAVGSAAYQTEGGWQQHGKGASIWDTFTHRPPAPPGDPSAAGWPSGAPSPPPPATGDVASDGYNNVFRDTEGLRELGVTHYRFSISWARVLPNGSASAPNREGLRYYRRLLERLRELGVQPVVTLYHWDLPQLLQDAYGGWANRALADHFRDYAELCFRHFGGQVKYWITIDNPYVVAWHGYATGRLAPGVRGSPRLGYLVAHNLLLAHAKIWHLYDTSFRPTQGGQVSIALSSHWISPRRMTEHSIKECQKSLDFVLGWFAKPIFIDGDYPESMKNNLSSLLPDFTESEKKFIKGTADFFALSFGPTLSFQLLDPQMKFRQLESPSLRQLLSWIDLEYNHPQIFIVENGWFVSGTTKRDDAKYMYYLKKFIMETLKAIRLDGVDVIGYTAWSLMDGFEWHRGYSIRRGLFYVDFLSQDKKLLPKSSALFYQKLIENNGFPPLPENQPLEGTFPCDFAWGVVDNCIQVDTTLSQFIDPNVYLWDVHRSKRLIKVDGVLTKTRKSYCVDFAAIRPQIALLQEMHVTHFHFSLDWALILPLGNRSQVNRTVLGFYRCVASELVRANITPVVALWRPAAPHQGLPAPLARHGAWENPHTALAFAEYASLCFQDLGRHVKFWITMHEPSTRNMTYSAGHNLLKAHALAWRTYDERFRRSQKGKISIALQADWIEPACPFSPEDREVAERVLEFDIGWLAEPIFGSGDYPRVMREWLNQRNNFLLPYFTDEEKKLIRGSFDFLALSHYTTILVDWEKEDPIKYNDYLAVQEMTDITWLNSPSQVAVVPWGLRKVLNWLKAKYGDLPMYIISNGIDDDPHTAQDNLRVYYMQNYVNEALKAYILDGINLCGYFAYSFNDRTAPKFGLYRYAANQFEPKPSMKHYRKIIDNNGFPGPETLGRFCPEEFTLCTECSFFHARKSLLAFIAFLLFAFVISLSLIFYYSKKGRRGYK

SEQ ID NO: 121 - protein, 4570 aa, Canis familiaris
ATGGCCACCTGCATTTTACAGATGAGATTCCTAAGGCTGGGGAAGATACTGTTCCACTCCAGCCCACAAAGCACAGGTGGCAGTGGTGGGACCCGGGGACCTCGAGCTCCGGCACAGCTGCGAACGCAGCGTGGCACAGATAAGTTAGTTGCTAAGTCAGAGCTCAAGGCTAAAACGGCCCACCGCGCGCTGGCCGACCACTTCAGGGACTACGCCGAGCTCTGCTTCCGCCACTTCTGCGGCCAGGTCAAGTACTGGATCACCATCGACAACCCCTACGTGGTGGCCTGGCACGGCTACGCCACCGGGCGCCTGGCCCCCGGCGTCCGGGGCAGCCCGCGGCTCGGGTACCTGGTGGCGCACAACCTCCTCCTGGCTCACGCCAAAATCTGGCATCTCTACAATACTTCTTTCCGCCCAACTCAGGGAGGCCAGGTATCCATTGCCCTAAGCTCCCACTGGATCAATCCTCGAAGAATGACCGACCATAGCATCAAAGAATGTCAAAAATCTCTTGACTTTGTACTAGGCTGGTTTGCCAAGCCCATATTTATTGATGGTGACTATCCTGAGAGCATGAAGAATAACCTGTCATCTCTTCTGCCTGTTTTTACTGAATCTGAGAAAAAGTTCATCAAGGGAACAGCTGACTTTTTTGCTCTTTCTTTTGGACCAACTTTGAGTTTTCAACTCTTGGACCCTCATATGAAGTTCCACCAATTAGAATCTCCCAGCCTGAGGCAACTCCTTTCTTGGATTGACCTTGAATATAACCACCCTCAAATATTTATTGTGGAAAATGGCTGGTTTGTCTCAGGGACCACCAAGAGAGATGATGCCAAATATATGTATTACCTCAAAAAATTCATAATGGAAACCTTAAAAGCCATCAGGCTGGATGGGGTGGATGTCATAGGATACACAGCGTGGTCCCTTATGGATGGCTTCGAGTGGCACAGAGGCTACAGCATCAGACGTGGACTCTTCTACGTGGACTTTCTAAGCCAGGATAAGAAACTGTTGCCAAAGTCTTCAGCCTTGTTCTACCAAAAGCTGATAGAGAAAAATGGCTTCCCTCCTTTACCTGAAAATCAGCCCCTAGAAGGGACATTTCCCTGTGACTTTGCTTGGGGAATTGTTGACAACTACATTCAAGTGGACACCACTCTGTCTCAGTTTACCGACCCGAACGTTTACCTGTGGGACGTCCATCACAGCAAGAGGCTGATTAAGGTGGACGGGCTGCGGGCCAAGAAGAGGAAGCCCTACTGCGTGGACTTTGCCGCCATCGGGCCCCAGGTGGCCCTGCTGCAGGAGATGCACGTCTCGCATTTTCACTTCTCGCTGGACTGGGCCCTGCTCCTGCCGCTGGGCAACCAGTCCCGGGTGAACCACGCGGCCCTGCACTACTACGGCTGCGTGGCCAGCGAGCTCCTGCGCGCCAACATCACCCCGGTGGTGGCGCTCTGGCGCCCCGCCGCCGCGCACCAGGGCCTGCCGGGGCCGCTGGCCCAGCGCGGCGCCTGGGAGAACCCGCGCACCGCCCTGGCGTTCGCCGAGTACGCGCGCCTGTGCTTCCGCGCCCTGGGCCGCCACGTCAAGGTGTGGATCACGCTGCGCGAGCCGCCCACGCGGAACCTGACGCTCCGCGCCGGGCACAACCTGCTGCGGGCGCACGCGCTGGCCTGGCGCGTGTACGACGAGCAGTTCCGGGGCTCGCAGCAGGGGAAGGTGTCCATCGCCCTGCAGGCCGACTGGGTGGAGCCCGCCTGCCCCTCCTCCCAGAAGGACCGCGAAGTGGCCGAGAGGGTTCTGGAGTTCGACGTCGGCTGGCTGGCCGAGCCCATCTTCGGCTCCGGGGACTACCCGCGGCTGATGCGCGACTGGCTCACCCGGAGAGACCATTCCCTCCTGCCCTATTTCACTGACGAAGAGAAGAGGCTAATCCGGGGTTCCTTTGACTTCCTGGCCTTGAGCCATTACACCACCATCCTCGTGGACTGGGAAAAGGAAGACCCAGTCAAATACAATGATTACCTGGAAGTGCAGGAGATGACCGACATCACCTGGCTCAACTCCCCCAGTCAGGTGGCCGTAGTGCCCTGGGGCCTGCGCAAAGTGCTCAACTGGCTCAAGTTCAAGTACGGAGACCTCCCCATGTATATCGTATCCAACGGCATAGATGACGATCCGCGGGCAGCCCAGGACTCGTTGAGGGTGTATTACATGCAGAACTATGTAAATGAAGCTCTGAAAGCCTACGTATTGGATGGTATCAATCTTTGTGGATACTTTGCCTACTCATTTAATGATCGCACAGCTCCGAAGTTTGGCCTCTATCATTATGCTGCAAACCAGTTTGAGCCCAAACCGTCGGTGAAGCATTACAGGAAAATTATTGACAACAATGGCTTCCCAGGCCCTGAAACTTTGGGGCGGTTTTGTCCAGAGGAATTCACCCTGTGCACCGAATGCAGCTTTTTTCACACCCGAAAGTCTTTACTGGCTTTCATAGCTTTCCTACTTTTTGCTTTTATTATTTCTCTTTCTCTGATTTTCTACTACTCTAGGAAAGGCAGAAGAAGTTATAAATAGTCCTGAACATTTTCCTATTCATCTATTTTGAAATAATTATGCACATACATCAGCTGTTAACCATTTGCACTTCTCAGTGTTGTGAAACTATAGGTTTCGTTATTCCGGCTTCTAGAAGAAAAATTTTTGTGGCATATGACAGACGTTTGTAAATGAGCATAGCTGATTGTAAAATATTGGATAATGTGAATAGTGCCTGGATTTGTTCTTTTTTTGAAGGGTAATCAAAGACTGTCAGGGGCCATCATTCCTGTAACACACACTGTAACAAATGTATGGGAAGTGGGGGTCACTCTGCAACATTTTTACAGAAATTGAATGGTGCCCATTCAATTAGTGCCCATTCTTAAATGTAATGTTTATCTCGAAGTAATAATTGCAGATGTTGGAATAAAAAGTTAAAAGGTCCCAAGCAACCATCTCTAAACCGCCATGATATGCCTAAGGGTTCGCTGTTGAACCAAGTTTCCCCTGAAAAACAAAGGGGTAGAATATAGGAGAAGTGACAAGGGGCCAAGGGGGGCAGCAACGTTCCTTTTAAAAGCAGTGTTTCTAGCAAATGCTGCTAATATTAGTTTCCGTGTCTGGTTAATGATATGTTTAGCAGAGCAGATTATAGAACTTCATCGTTTGTGACTTTTGAGGTCTCCAGGCCCGGGGGTCCTTGAGGACTTTGTGTTACTGGGGCCTTACCAAGGGCCTGCGCAAAAAGGACTCTTAATGTTTGTAGAAAAATAAGTATGAATCGTGAGATGTTGGCCTCTTCAGGAAGCATGAACTGATCTTGAAATGCATTGTACTGCGTGGCTCTAGGGGGAGGAAAGGAGGAAAAAGTACTTATTATGAGCAACGGTATGATTAATTTGATTATAAACTCTTCGATTTTAGAGCACTCCATGCAATGAATGATGTGACCTTTCCTGAGCAAGTGAGAACGAAATAATAACTCATCCGCTGACGAGTGACTTCGCTTGCTGTTCTTCAGAATGTGTCATGATTTCTTTGAATTGAGGTTTTTAAAATTCTTAGTAGGCTCCAAAGCATTTGGTCTGATAACACTGGGAGATTTGTTCCTATGATTGCTGAGGTTTATTTTACATTGTTGCTGCAACTTCTGTGGAACTAGCTTTGAACTAGTTTTGCTTTGAACTTTCACAGTGAAACAGGCTACTGATTTCTAGAAAGGGCTAATGAGGTCTTATCCTTGAAAGCCCCTTAAGTTTTGATGATTTTCAGACAGGGGTCTTTCTGTTACACTGGAGTTGCGGATGATCATGTTATTTCTTTTCTAGATAAGCCAATATCATATCAGGCAAGGTAAACCACTATCATATCTAGCATCGCTAATCTTGCTGACACAGGGTGATAGTGTGCAAAAAAATTGCTGTACTGTATTATGTATCATCTTCAGAGGTGGTAGGATTTTTTTTCCATGAAAGATGAGCTTTTGTTGGTAATCTTTTAAAAATTGGACTTGGTATTAAAATTAGAAACTAGATATAATAGTTTCTTTTATGTATATATTTTTTCCGATTCTTAGAGTAATTTATGTTCATTGTAAAAAATTGAAAAACACAGAAACTATATGTAAAGAGAAAAATGACCTATAAGCTCACTACCAAAGTGGCCACTATTAACATAGCCGATGTATTTTATTTTGCATGGAGTCAGATCATATTGCAAATAATTATGTGTCTTTATTAATTTCTATCGTGTGTGTTTCTTTTGTCATTAGTCTTCAAAAGCATGATTTCTAATAGTTGTAGAGTGATTCTGCTTTATGAATTTATCACAACTCATGTAACCATTCCTATTGGTTGGACCAGTTTATTGTTAATTACTGTTAAATAATGTTTAAAAATATTCTTGCTACAACATTAATTTTCATTTCCTTGAGTGTAGACAGAAGTAATTCTGTCCCTTGATGAAGTATTGTAATAAATCTGCCTGAGGCTTTGCTTCTTTCCTAATTATA

SEQ ID NO: 122 - protein, 2805 aa, Felis catus
CATGGTGATTAGTGGACTAGGCTCATGCCAAAATCTGGCATCTCTACAATACTTCTTTCCGTCCAACTCAGGGAGGCCAGGTCTCCATCGCCCTAAGCTCCCACTGGATCAATCCTCGAAGAATGACCGACCACAGCATCAAAGAATGTCAAAAGTCTCTTGACTTTGTACTAGGCTGGTTTGCCAAACCCATATTTATTGATGGTGACTATCCTGAGAGCATGAAGAATAATCTTTCACATCTTCTGCCTGATTTTACTGAAGCTGAGAAAAAGTTCATTAAGGGAACAGCTGACTTTTTTGCTCTTTCTTTTGGACCAACCTTGAGTTTTCAACTATTGGACCCCCACATGAAGTTCCGCCAGTTAGAATCTCCCAGCCTGAGGCAACTCCTTTCTTGGATTGACCTTGAATATAACCACCCTCAAATATTTATTGTGGAAAATGGCTGGTTTGTCTCAGGGACCACCAAGAGAGACGACGCCAAATATATGTATTACCTCAAAAAATTCGTAATGGAAACCTTAAAAGCCATTAGGCTGGATGGGGTGGACGTCATTGGGTACACGGCCTGGTCCCTTATGGATGGCTTCGAATGGCACAGAGGTTACAGCATCAGGCGTGGACTCTTCTATGTTGACTTTCTAAGCCAGGATAAGAAACTGTTGCCGAAATCTTCAGCCTTGTTCTACCAAAAGCTGATAGAGAAAAATGGCTTCCCTCCTTTACCTGAAAATCAACCTCTAGAAGGGACATTTCCCTGTGACTTTGCTTGGGGAATTGTTGACAACTACATTCAAGTGGACACCACTCTGTCTCAGTTTACCGACCCGAACGTTTACCTGTGGGACGTCCACCACAGTAAGAGGCTAATTAAGGTGGACGGGGTTGTGACCAAGAAGCGGAAGTCCTACTGCGTGGACTTCGCTGCCATCCGGCCCCAGATAGCCTTACTCCAGGAGATGCACGTTTCCCATTTCCACTTCTCCCTGGACTGGGCCCTGATCCTGCCGCTGGGCAACCAGTCCCAGGTGAACCACACGGTCCTCGACTACTACCGCTGCGTGGTCAGCGAGCTCGTGCGCGCCAACATCACCCCGGTGGTGGCGCTCTGGCGACCCGCGGCCCCGCACCAAGGGCTGCCGCGGCCCCTGGCCAAGCACGGAGCCTGGGAGAACCCACACACCGCCTCGGCTTTTGCAGAGTACGCCCGGCTGTGCTTCAAGGATCTCGGCCACCACGTCAAGTTCTGGATCACGATGGGCGAGCCGTACACACGGAACATGACCTACAGCGCGGGGCACAATCTTCTGAAGGCTCACGCGTTGGCCTGGCGCGTGTACGATGAAAACTTTCGGGGCTCTCAGAAGGGGAAAATATCCATAGCCCTGCAGGCCGACTGGATAGAGCCGGCCTGCCCTTTCTCCCAAAAGGACAAAGAAGTGGCAGAGAGAGTTTTGGAATTTGACATTGGCTGGCTGGCCGAGCCCATTTTCGGCTCTGGGGATTATCCGCGTGTGATGAGGGACTGGCTCACGCAGAGAAACAATTTCCTTCTACCTTATTTCACTGAAGATGAAAAAAAGCTAATCCGGGGTTCCTTCGACTTTCTGGCCGTAAGCCATTACACCACCATCCTCGTCGACTGGGAAAAAGAAGATCCAATGAAATACAACGATTACCTGGAGGTGCAGGAAATGACCGACATCACGTGGCTCAACTCCCCCAGTCAGGTGGCAGTAGTGCCCTGGGGCTTACGCAAAATTCTCAACTGGCTGAAGCTGAAGTACGGAGACCTCCCCATGTATATAATATCCAACGGCATAGACGACGATCCGCAGGCAGCGCAAGACAAGCTGAGGGTGTATTACATGCAAAATTATGTAAATGAAGCTCTGAAAGCCTACGTATTGGATGGTGTCAATCTTTGTGGATACTTTGCTTATTCATTCAATGATCGCACAGCTCCAAAGTTTGGCTTCTATCATTACGCTGCAAATCAGTTTGAGCCCAAACCGTCCATGAAACATTATCGGAAAATGATTGACAGCAATGGCTTCTCCGGTCCTGACACTCTGGGGAGATTTTGTCCAGAAGAATTCACCCTGTGCACCGAATGCGGCTTTTTTCACACCCGCAAATCTTTACTGGCTTTCATAGCTTTCCTACTTTTTGCTTTTATTATTTCTCTTTCTCTGATTTTTTACTACTCTAAGAAAGGCAAAAGAAGTTACAAGTAGTCCTGACCTTTTTCCTATTCATTTACTTTGAAATGATTATGCACACACATCAGCTGTTCACCATTTGCACTTCTCAGTGTCGTAAGACTGGATTTCACTTATCTGACTTCTAGAAAAAAAATGTGTGGCGTATGACAGAGGTATGGAAGTGAGCATAGGTGATTGTAAAATACTGAATAATGTGAATAGTGCCTGGATTTGTTCTTTCTTGGAGGATGATCAAAGACGGTTAGGGGCCATCATCTCTGCAACACATTCTGTAACAAATGTATGGGAAGTGGGACCCATTCTGGAACATTTTTATAGAAATTGAATAGCAAGATCAGTGCCCGTTCCTAAATTATCTTGAAGTAAAACAAATGTGGAAATAAAAAGTTAAGTCCCAAATAACCATCTCTAAACTTCCATGATATGCCTAATGGTCTCTGTTGGACCCAGTTTCCCTTGAAAAAGAAATGGTAGAATATTAGAGACATGACAGAGGGCCCTACGCTAGAACGTTCCTTTTATTTTTTTTTTTAAATTTTTTTTCAATGTTTTTATTTATTTTTGGGACAGAGAGAGA

SEQ ID NO: 123 - protein, 3178 aa, Felis catus
GGGGTCACCCACTACCGCTTCTCCATCTCGTGGGCGCGGGTGCTCCCCAATGGCAGCGCGGGCGCCCCCAACCGCGAGGGGCTGCGCTACTACCGGCGCCTGCTGGAGCGGCTGCGGGAGCTGGGCGTGCAGCCCGTGGTCACCCTGTACCACTAGGACCTGCCCCAGCGCCTGCAGGACGCCTACGGCGGCTGGGCCAACCGCGCCCTGGCCGACCACTTCAGGGATTACGCCGAGCTCTGCTTCCGCCACTTCGGCGGCCAGGTCAAGTACTGGATCACCATCGACAACCCCTACGTGGTGGCCTGGCACGGCTACGCCACCGGGCGCCTGGCCCCTGGCGTCCGGGGCAGCGCGCGGCTCGGGTACCTGGTGGCGCACAACCTCCTCCTGGCTCATGCCAAAATCTGGCATCTCTACAATACTTCTTTCCGTCCAACTCAGGGAGGCCAGGTCTCCATCGCCCTAAGCTCCCACTGGATCAATCCTCGAAGAATGACCGACCACAGCATCAAAGAATGTCAAAAGTCTCTTGACTTTGTACTAGGCTGGTTTGCCAAACCCATATTTATTGATGGTGACTATCCTGAGAGCATGAAGAATAATCTTTCACATCTTCTGCCTGATTTTACTGAAGCTGAGAAAAAGTTCATTAAGGGAACAGCTGACTTTTTTGCTCTTTCTTTTGGACCAACCTTGAGTTTTCAACTATTGGACCCCCACATGAAGTTCCGCCAGTTAGAATCTCCCAGCCTGAGGCAACTCCTTTCTTGGATTGACCTTGAATATAACCACCCTCAAATATTTATTGTGGAAAATGGCTGGTTTGTCTCAGGGACCACCAAGAGAGACGACGCCAAATATATGTATTACCTCAAAAAATTCGTAATGGAAACCTTAAAAGCCATTAGGCTGGATGGGGTGGACGTCATTGGGTACACGGCCTGGTCCCTTATGGATGGCTTCGAATGGCACAGAGGTTACAGCATCAGGCGTGGACTCTTCTATGTTGACTTTCTAAGCCAGGATAAGAAACTGTTGCCGAAATCTTCAGCCTTGTTCTACCAAAAGCTGATAGAGAAAAATGGCTTCCCTCCTTTACCTGAAAATCAACCTCTAGAAGGGACATTTCCCTGTGACTTTGCTTGGGGAATTGTTGACAACTACATTCAAGTGGACACCACTCTGTCTCAGTTTACCGACCCGAACGTTTACCTGTGGGACGTCCACCACAGTAAGAGGCTAATTAAGGTGGACGGGGTTGTGACCAAGAAGCGGAAGTCCTACTGCGTGGACTTCGCTGCCATCCGGCCCCAGATAGCCTTACTCCAGGAGATGCACGTTTCCCATTTCCACTTCTCCCTGGACTGGGCCCTGATCCTGCCGCTGGGCAACCAGTCCCAGGTGAACCACACGGTCCTCGACTACTACCGCTGCGTGGTCAGCGAGCTCGTGCGCGCCAACATCACCCCGGTGGTGGCGCTCTGGCGACCCGCGGCCCCGCACCAAGGGCTGCCGCGGCCCCTGGCCAAGCACGGAGCCTGGGAGAACCCACACACCGCCTCGGCTTTTGCAGAGTACGCCCGGCTGTGCTTCAAGGATCTCGGCCACCACGTCAAGTTCTGGATCACGATGGGCGAGCCGTACACACGGAACATGACCTACAGCGCGGGGCACAATCTTCTGAAGGCTCACGCGTTGGCCTGGCGCGTGTACGATGAAAACTTTCGGGGCTCTCAGAAGGGGAAAATATCCATAGCCCTGCAGGCCGACTGGATAGAGCCGGCCTGCCCTTTCTCCCAAAAGGACAAAGAAGTGGCAGAGAGAGTTTTGGAATTTGACATTGGCTGGCTGGCCGAGCCCATTTTCGGCTCTGGGGATTATCCGCGTGTGATGAGGGACTGGCTCACGCAGAGAAACAATTTCCTTCTACCTTATTTCACTGAAGATGAAAAAAAGCTAATCCGGGGTTCCTTCGACTTTCTGGCCGTAAGCCATTACACCACCATCCTCGTCGACTGGGAAAAAGAAGATCCAATGAAATACAACGATTACCTGGAGGTGCAGGAAATGACCGACATCACGTGGCTCAACTCCCCCAGTCAGGTGGCAGTAGTGCCCTGGGGCTTACGCAAAATTCTCAACTGGCTGAAGCTGAAGTACGGAGACCTCCCCATGTATATAATATCCAACGGCATAGACGACGATCCGCAGGCAGCGCAAGACAAGCTGAGGGTGTATTACATGCAAAATTATGTAAATGAAGCTCTGAAAGCCTACGTATTGGATGGTGTCAATCTTTGTGGATACTTTGCTTATTCATTCAATGATCGCACAGCTCCAAAGTTTGGCTTCTATCATTACGCTGCAAATCAGTTTGAGCCCAAACCGTCCATGAAACATTATCGGAAAATGATTGACAGCAATGGCTTCTCCGGTCCTGACACTCTGGGGAGATTTTGTCCAGAAGAATTCACCCTGTGCACCGAATGCGGCTTTTTTCACACCCGCAAATCTTTACTGGCTTTCATAGCTTTCCTACTTTTTGCTTTTATTATTTCTCTTTCTCTGATTTTTTACTACTCTAAGAAAGGCAAAAGAAGTTACAAGTAGTCCTGACCTTTTTCCTATTCATTTACTTTGAAATGATTATGCACACACATCAGCTGTTCACCATTTGCACTTCTCAGTGTCGTAAGACTGGATTTCACTTATCTGACTTCTAGAAAAAAAATGTGTGGCGTATGACAGAGGTATGGAAGTGAGCATAGGTGATTGTAAAATACTGAATAATGTGAATAGTGCCTGGATTTGTTCTTTCTTGGAGGATGATCAAAGACGGTTAGGGGCCATCATCTCTGCAACACATTCTGTAACAAATGTATGGGAAGTGGGACCCATTCTGGAACATTTTTATAGAAATTGAATAGCAAGATCAGTGCCCGTTCCTAAATTATCTTGAAGTAAAACAAATGTGGAAATAAAAAGTTAAGTCCCAAATAACCATCTCTAAACTTCCATGATATGCCTAATGGTCTCTGTTGGACCCAGTTTCCCTTGAAAAAGAAATGGTAGAATATTAGAGACATGACAGAGGGCCCTACGCTAGAACGTTCCTTTTATTTTTTTTTTTAAATTTTTTTTCAATGTTTTTATTTATTTTTGGGACAGAGAGAGA

SEQ ID NO: 124 - protein, 2968 aa, Felis catus
TCTTTCTGGATTGCTCCGTCATGAGAACCGGTGTCAGCACGTGGGCTGGTTTACTGAAAGGTGAAGACAGACTTTGGAAGATCAAAGATCACCCTGGATGTTCTCGCCACCGGTGAGATCCCAGCTGAGTGCAGCTATATGCGTGACCTCTGCTACATCACATGGAGCAGAGGAACTGTCCAGGCTCATGCCAAAATCTGGCATCTCTACAATACTTCTTTCCGTCCAACTCAGGGAGGCCAGGTCTCCATCGCCCTAAGCTCCCACTGGATCAATCCTCGAAGAATGACCGACCACAGCATCAAAGAATGTCAAAAGTCTCTTGACTTTGTACTAGGCTGGTTTGCCAAACCCATATTTATTGATGGTGACTATCCTGAGAGCATGAAGAATAATCTTTCACATCTTCTGCCTGATTTTACTGAAGCTGAGAAAAAGTTCATTAAGGGAACAGCTGACTTTTTTGCTCTTTCTTTTGGACCAACCTTGAGTTTTCAACTATTGGACCCCCACATGAAGTTCCGCCAGTTAGAATCTCCCAGCCTGAGGCAACTCCTTTCTTGGATTGACCTTGAATATAACCACCCTCAAATATTTATTGTGGAAAATGGCTGGTTTGTCTCAGGGACCACCAAGAGAGACGACGCCAAATATATGTATTACCTCAAAAAATTCGTAATGGAAACCTTAAAAGCCATTAGGCTGGATGGGGTGGACGTCATTGGGTACACGGCCTGGTCCCTTATGGATGGCTTCGAATGGCACAGAGGTTACAGCATCAGGCGTGGACTCTTCTATGTTGACTTTCTAAGCCAGGATAAGAAACTGTTGCCGAAATCTTCAGCCTTGTTCTACCAAAAGCTGATAGAGAAAAATGGCTTCCCTCCTTTACCTGAAAATCAACCTCTAGAAGGGACATTTCCCTGTGACTTTGCTTGGGGAATTGTTGACAACTACATTCAAGTGGACACCACTCTGTCTCAGTTTACCGACCCGAACGTTTACCTGTGGGACGTCCACCACAGTAAGAGGCTAATTAAGGTGGACGGGGTTGTGACCAAGAAGCGGAAGTCCTACTGCGTGGACTTCGCTGCCATCCGGCCCCAGATAGCCTTACTCCAGGAGATGCACGTTTCCCATTTCCACTTCTCCCTGGACTGGGCCCTGATCCTGCCGCTGGGCAACCAGTCCCAGGTGAACCACACGGTCCTCGACTACTACCGCTGCGTGGTCAGCGAGCTCGTGCGCGCCAACATCACCCCGGTGGTGGCGCTCTGGCGACCCGCGGCCCCGCACCAAGGGCTGCCGCGGCCCCTGGCCAAGCACGGAGCCTGGGAGAACCCACACACCGCCTCGGCTTTTGCAGAGTACGCCCGGCTGTGCTTCAAGGATCTCGGCCACCACGTCAAGTTCTGGATCACGATGGGCGAGCCGTACACACGGAACATGACCTACAGCGCGGGGCACAATCTTCTGAAGGCTCACGCGTTGGCCTGGCGCGTGTACGATGAAAACTTTCGGGGCTCTCAGAAGGGGAAAATATCCATAGCCCTGCAGGCCGACTGGATAGAGCCGGCCTGCCCTTTCTCCCAAAAGGACAAAGAAGTGGCAGAGAGAGTTTTGGAATTTGACATTGGCTGGCTGGCCGAGCCCATTTTCGGCTCTGGGGATTATCCGCGTGTGATGAGGGACTGGCTCACGCAGAGAAACAATTTCCTTCTACCTTATTTCACTGAAGATGAAAAAAAGCTAATCCGGGGTTCCTTCGACTTTCTGGCCGTAAGCCATTACACCACCATCCTCGTCGACTGGGAAAAAGAAGATCCAATGAAATACAACGATTACCTGGAGGTGCAGGAAATGACCGACATCACGTGGCTCAACTCCCCCAGTCAGGTGGCAGTAGTGCCCTGGGGCTTACGCAAAATTCTCAACTGGCTGAAGCTGAAGTACGGAGACCTCCCCATGTATATAATATCCAACGGCATAGACGACGATCCGCAGGCAGCGCAAGACAAGCTGAGGGTGTATTACATGCAAAATTATGTAAATGAAGCTCTGAAAGCCTACGTATTGGATGGTGTCAATCTTTGTGGATACTTTGCTTATTCATTCAATGATCGCACAGCTCCAAAGTTTGGCTTCTATCATTACGCTGCAAATCAGTTTGAGCCCAAACCGTCCATGAAACATTATCGGAAAATGATTGACAGCAATGGCTTCTCCGGTCCTGACACTCTGGGGAGATTTTGTCCAGAAGAATTCACCCTGTGCACCGAATGCGGCTTTTTTCACACCCGCAAATCTTTACTGGCTTTCATAGCTTTCCTACTTTTTGCTTTTATTATTTCTCTTTCTCTGATTTTTTACTACTCTAAGAAAGGCAAAAGAAGTTACAAGTAGTCCTGACCTTTTTCCTATTCATTTACTTTGAAATGATTATGCACACACATCAGCTGTTCACCATTTGCACTTCTCAGTGTCGTAAGACTGGATTTCACTTATCTGACTTCTAGAAAAAAAATGTGTGGCGTATGACAGAGGTATGGAAGTGAGCATAGGTGATTGTAAAATACTGAATAATGTGAATAGTGCCTGGATTTGTTCTTTCTTGGAGGATGATCAAAGACGGTTAGGGGCCATCATCTCTGCAACACATTCTGTAACAAATGTATGGGAAGTGGGACCCATTCTGGAACATTTTTATAGAAATTGAATAGCAAGATCAGTGCCCGTTCCTAAATTATCTTGAAGTAAAACAAATGTGGAAATAAAAAGTTAAGTCCCAAATAACCATCTCTAAACTTCCATGATATGCCTAATGGTCTCTGTTGGACCCAGTTTCCCTTGAAAAAGAAATGGTAGAATATTAGAGACATGACAGAGGGCCCTACGCTAGAACGTTCCTTTTATTTTTTTTTTTAAATTTTTTTTCAATGTTTTTATTTATTTTTGGGACAGAGAGAGA

SEQ ID NO: 125 - protein, 1204 aa, Artificial Sequence
  Signal_ECD_34_981_2xGS_Fc
MARLTVLALLAGLLASSRAEPGDGAQTWARVSRPPAPEAAGLFQGTFPDGFLWAVGSAAYQTEGGWQQHGKGASIWDTFTHHPLAPPGDSRNASLPLGAPSPLQPATGDVASDSYNNVFRDTEALRELGVTHYRFSISWARVLPNGSAGVPNREGLRYYRRLLERLRELGVQPVVTLYHWDLPQRLQDAYGGWANRALADHFRDYAELCFRHFGGQVKYWITIDNPYVVAWHGYATGRLAPGIRGSPRLGYLVAHNLLLAHAKVWHLYNTSFRPTQGGQVSIALSSHWINPRRMTDHSIKECQKSLDFVLGWFAKPVFIDGDYPESMKNNLSSILPDFTESEKKFIKGTADFFALCFGPTLSFQLLDPHMKFRQLESPNLRQLLSWIDLEFNHPQIFIVENGWFVSGTTKRDDAKYMYYLKKFIMETLKAIKLDGVDVIGYTAWSLMDGFEWHRGYSIRRGLFYVDFLSQDKMLLPKSSALFYQKLIEKNGFPPLPENQPLEGTFPCDFAWGVVDNYIQVDTTLSQFTDLNVYLWDVHHSKRLIKVDGVVTKKRKSYCVDFAAIQPQIALLQEMHVTHFRFSLDWALILPLGNQSQVNHTILQYYRCMASELVRVNITPVVALWQPMAPNQGLPRLLARQGAWENPYTALAFAEYARLCFQELGHHVKLWITMNEPYTRNMTYSAGHNLLKAHALAWHVYNEKFRHAQNGKISIALQADWIEPACPFSQKDKEVAERVLEFDIGWLAEPIFGSGDYPWVMRDWLNQRNNFLLPYFTEDEKKLIQGTFDFLALSHYTTILVDSEKEDPIKYNDYLEVQEMTDITWLNSPSQVAVVPWGLRKVLNWLKFKYGDLPMYIISNGIDDGLHAEDDQLRVYYMQNYINEALKAHILDGINLCGYFAYSFNDRTAPRFGLYRYAADQFEPKASMKHYRKIIDSNGFPGPETLERFCPEEFTVCTECSFFHTRKSGGGGSGGGGSDKTHTCPPCPAPELLGGPSVFLFPPKPKDTLMISRTPEVTCVVVDVSHEDPEVKFNWYVDGVEVHNAKTKPREEQYNSTYRVVSVLTVLHQDWLNGKEYKCKVSNKALPAPIEKTISKAKGQPREPQVYTLPPSRDELTKNQVSLTCLVKGFYPSDIAVEWESNGQPENNYKTTPPVLDSDGSFFLYSKLTVDKSRWQQGNVFSCSVMHEALHNHYTQKSLSLSPGK

SEQ ID NO: 126 - protein, 1223 aa, Artificial Sequence
  1_981_V45F_3xGS__IgG1_noCH1_Fc_Fusion
MPASAPPRRPRPPPPSLSLLLVLLGLGGRRLRAEPGDGAQTWARFSRPPAPEAAGLFQGTFPDGFLWAVGSAAYQTEGGWQQHGKGASIWDTFTHHPLAPPGDSRNASLPLGAPSPLQPATGDVASDSYNNVFRDTEALRELGVTHYRFSISWARVLPNGSAGVPNREGLRYYRRLLERLRELGVQPVVTLYHWDLPQRLQDAYGGWANRALADHFRDYAELCFRHFGGQVKYWITIDNPYVVAWHGYATGRLAPGIRGSPRLGYLVAHNLLLAHAKVWHLYNTSFRPTQGGQVSIALSSHWINPRRMTDHSIKECQKSLDFVLGWFAKPVFIDGDYPESMKNNLSSILPDFTESEKKFIKGTADFFALCFGPTLSFQLLDPHMKFRQLESPNLRQLLSWIDLEFNHPQIFIVENGWFVSGTTKRDDAKYMYYLKKFIMETLKAIKLDGVDVIGYTAWSLMDGFEWHRGYSIRRGLFYVDFLSQDKMLLPKSSALFYQKLIEKNGFPPLPENQPLEGTFPCDFAWGVVDNYIQVDTTLSQFTDLNVYLWDVHHSKRLIKVDGVVTKKRKSYCVDFAAIQPQIALLQEMHVTHFRFSLDWALILPLGNQSQVNHTILQYYRCMASELVRVNITPVVALWQPMAPNQGLPRLLARQGAWENPYTALAFAEYARLCFQELGHHVKLWITMNEPYTRNMTYSAGHNLLKAHALAWHVYNEKFRHAQNGKISIALQADWIEPACPFSQKDKEVAERVLEFDIGWLAEPIFGSGDYPWVMRDWLNQRNNFLLPYFTEDEKKLIQGTFDFLALSHYTTILVDSEKEDPIKYNDYLEVQEMTDITWLNSPSQVAVVPWGLRKVLNWLKFKYGDLPMYIISNGIDDGLHAEDDQLRVYYMQNYINEALKAHILDGINLCGYFAYSFNDRTAPRFGLYRYAADQFEPKASMKHYRKIIDSNGFPGPETLERFCPEEFTVCTECSFFHTRKSGGGGSGGGGSGGGGSDKTHTCPPCPAPELLGGPSVFLFPPKPKDTLMISRTPEVTCVVVDVSHEDPEVKFNWYVDGVEVHNAKTKPREEQYNSTYRVVSVLTVLHQDWLNGKEYKCKVSNKALPAPIEKTISKAKGQPREPQVYTLPPSRDELTKNQVSLTCLVKGFYPSDIAVEWESNGQPENNYKTTPPVLDSDGSFFLYSKLTVDKSRWQQGNVFSCSVMHEALHNHYTQKSLSLSPGK

SEQ ID NO: 127 - protein, 1572 aa, Artificial Sequence
  HSA_Signal_HSA_Seq_GS_ECD_34_981
MKWVTFISLLFLFSSAYSRGVFRRDAHKSEVAHRFKDLGEENFKALVLIAFAQYLQQCPFEDHVKLVNEVTEFAKTCVADESAENCDKSLHTLFGDKLCTVATLRETYGEMADCCAKQEPERNECFLQHKDDNPNLPRLVRPEVDVMCTAFHDNEETFLKKYLYEIARRHPYFYAPELLFFAKRYKAAFTECCQAADKAACLLPKLDELRDEGKASSAKQRLKCASLQKFGERAFKAWAVARLSQRFPKAEFAEVSKLVTDLTKVHTECCHGDLLECADDRADLAKYICENQDSISSKLKECCEKPLLEKSHCIAEVENDEMPADLPSLAADFVESKDVCKNYAEAKDVFLGMFLYEYARRHPDYSVVLLLRLAKTYETTLEKCCAAADPHECYAKVFDEFKPLVEEPQNLIKQNCELFEQLGEYKFQNALLVRYTKKVPQVSTPTLVEVSRNLGKVGSKCCKHPEAKRMPCAEDYLSVVLNQLCVLHEKTPVSDRVTKCCTESLVNRRPCFSALEVDETYVPKEFNAETFTFHADICTLSEKERQIKKQTALVELVKHKPKATKEQLKAVMDDFAAFVEKCCKADDKETCFAEEGKKLVAASQAALGLGGGGSGGGGSGGGGSEPGDGAQTWARFSRPPAPEAAGLFQGTFPDGFLWAVGSAAYQTEGGWQQHGKGASIWDTFTHHPLAPPGDSRNASLPLGAPSPLQPATGDVASDSYNNVFRDTEALRELGVTHYRFSISWARVLPNGSAGVPNREGLRYYRRLLERLRELGVQPVVTLYHWDLPQRLQDAYGGWANRALADHFRDYAELCFRHFGGQVKYWITIDNPYVVAWHGYATGRLAPGIRGSPRLGYLVAHNLLLAHAKVWHLYNTSFRPTQGGQVSIALSSHWINPRRMTDHSIKECQKSLDFVLGWFAKPVFIDGDYPESMKNNLSSILPDFTESEKKFIKGTADFFALCFGPTLSFQLLDPHMKFRQLESPNLRQLLSWIDLEFNHPQIFIVENGWFVSGTTKRDDAKYMYYLKKFIMETLKAIKLDGVDVIGYTAWSLMDGFEWHRGYSIRRGLFYVDFLSQDKMLLPKSSALFYQKLIEKNGFPPLPENQPLEGTFPCDFAWGVVDNYIQVDTTLSQFTDLNVYLWDVHHSKRLIKVDGVVTKKRKSYCVDFAAIQPQIALLQEMHVTHFRFSLDWALILPLGNQSQVNHTILQYYRCMASELVRVNITPVVALWQPMAPNQGLPRLLARQGAWENPYTALAFAEYARLCFQELGHHVKLWITMNEPYTRNMTYSAGHNLLKAHALAWHVYNEKFRHAQNGKISIALQADWIEPACPFSQKDKEVAERVLEFDIGWLAEPIFGSGDYPWVMRDWLNQRNNFLLPYFTEDEKKLIQGTFDFLALSHYTTILVDSEKEDPIKYNDYLEVQEMTDITWLNSPSQVAVVPWGLRKVLNWLKFKYGDLPMYIISNGIDDGLHAEDDQLRVYYMQNYINEALKAHILDGINLCGYFAYSFNDRTAPRFGLYRYAADQFEPKASMKHYRKIIDSNGFPGPETLERFCPEEFTVCTECSFFHTRKS

SEQ ID NO: 128 - protein, 1581 aa, Artificial Sequence
  Native_1_981_GS_HSA_Seq
MPASAPPRRPRPPPPSLSLLLVLLGLGGRRLRAEPGDGAQTWARFSRPPAPEAAGLFQGTFPDGFLWAVGSAAYQTEGGWQQHGKGASIWDTFTHHPLAPPGDSRNASLPLGAPSPLQPATGDVASDSYNNVFRDTEALRELGVTHYRFSISWARVLPNGSAGVPNREGLRYYRRLLERLRELGVQPVVTLYHWDLPQRLQDAYGGWANRALADHFRDYAELCFRHFGGQVKYWITIDNPYVVAWHGYATGRLAPGIRGSPRLGYLVAHNLLLAHAKVWHLYNTSFRPTQGGQVSIALSSHWINPRRMTDHSIKECQKSLDFVLGWFAKPVFIDGDYPESMKNNLSSILPDFTESEKKFIKGTADFFALCFGPTLSFQLLDPHMKFRQLESPNLRQLLSWIDLEFNHPQIFIVENGWFVSGTTKRDDAKYMYYLKKFIMETLKAIKLDGVDVIGYTAWSLMDGFEWHRGYSIRRGLFYVDFLSQDKMLLPKSSALFYQKLIEKNGFPPLPENQPLEGTFPCDFAWGVVDNYIQVDTTLSQFTDLNVYLWDVHHSKRLIKVDGVVTKKRKSYCVDFAAIQPQIALLQEMHVTHFRFSLDWALILPLGNQSQVNHTILQYYRCMASELVRVNITPVVALWQPMAPNQGLPRLLARQGAWENPYTALAFAEYARLCFQELGHHVKLWITMNEPYTRNMTYSAGHNLLKAHALAWHVYNEKFRHAQNGKISIALQADWIEPACPFSQKDKEVAERVLEFDIGWLAEPIFGSGDYPWVMRDWLNQRNNFLLPYFTEDEKKLIQGTFDFLALSHYTTILVDSEKEDPIKYNDYLEVQEMTDITWLNSPSQVAVVPWGLRKVLNWLKFKYGDLPMYIISNGIDDGLHAEDDQLRVYYMQNYINEALKAHILDGINLCGYFAYSFNDRTAPRFGLYRYAADQFEPKASMKHYRKIIDSNGFPGPETLERFCPEEFTVCTECSFFHTRKSGGGGSGGGGSGGGGSDAHKSEVAHRFKDLGEENFKALVLIAFAQYLQQCPFEDHVKLVNEVTEFAKTCVADESAENCDKSLHTLFGDKLCTVATLRETYGEMADCCAKQEPERNECFLQHKDDNPNLPRLVRPEVDVMCTAFHDNEETFLKKYLYEIARRHPYFYAPELLFFAKRYKAAFTECCQAADKAACLLPKLDELRDEGKASSAKQRLKCASLQKFGERAFKAWAVARLSQRFPKAEFAEVSKLVTDLTKVHTECCHGDLLECADDRADLAKYICENQDSISSKLKECCEKPLLEKSHCIAEVENDEMPADLPSLAADFVESKDVCKNYAEAKDVFLGMFLYEYARRHPDYSVVLLLRLAKTYETTLEKCCAAADPHECYAKVFDEFKPLVEEPQNLIKQNCELFEQLGEYKFQNALLVRYTKKVPQVSTPTLVEVSRNLGKVGSKCCKHPEAKRMPCAEDYLSVVLNQLCVLHEKTPVSDRVTKCCTESLVNRRPCFSALEVDETYVPKEFNAETFTFHADICTLSEKERQIKKQTALVELVKHKPKATKEQLKAVMDDFAAFVEKCCKADDKETCFAEEGKKLVAASQAALGL

SEQ ID NO: 129 - protein, 15 aa, Artificial Sequence
  GS_linker_3x
GGGGSGGGGSGGGGS

SEQ ID NO: 130 - protein, 24 aa, Artificial Sequence
  HSA_Signal
MKWVTFISLLFLFSSAYSRGVFRR

SEQ ID NO: 131 - protein, 585 aa, Artificial Sequence [sequence omitted]

SEQ ID NO: 132 - protein, 609 aa, Artificial Sequence [sequence omitted]

SEQ ID NO: 133 - protein, 989 aa, Artificial Sequence
  Native_1_981_GG_6xHis
MPASAPPRRPRPPPPSLSLLLVLLGLGGRRLRAEPGDGAQTWARFSRPPAPEAAGLFQGTFPDGFLWAVGSAAYQTEGGWQQHGKGASIWDTFTHHPLAPPGDSRNASLPLGAPSPLQPATGDVASDSYNNVFRDTEALRELGVTHYRFSISWARVLPNGSAGVPNREGLRYYRRLLERLRELGVQPVVTLYHWDLPQRLQDAYGGWANRALADHFRDYAELCFRHFGGQVKYWITIDNPYVVAWHGYATGRLAPGIRGSPRLGYLVAHNLLLAHAKVWHLYNTSFRPTQGGQVSIALSSHWINPRRMTDHSIKECQKSLDFVLGWFAKPVFIDGDYPESMKNNLSSILPDFTESEKKFIKGTADFFALCFGPTLSFQLLDPHMKFRQLESPNLRQLLSWIDLEFNHPQIFIVENGWFVSGTTKRDDAKYMYYLKKFIMETLKAIKLDGVDVIGYTAWSLMDGFEWHRGYSIRRGLFYVDFLSQDKMLLPKSSALFYQKLIEKNGFPPLPENQPLEGTFPCDFAWGVVDNYIQVDTTLSQFTDLNVYLWDVHHSKRLIKVDGVVTKKRKSYCVDFAAIQPQIALLQEMHVTHFRFSLDWALILPLGNQSQVNHTILQYYRCMASELVRVNITPVVALWQPMAPNQGLPRLLARQGAWENPYTALAFAEYARLCFQELGHHVKLWITMNEPYTRNMTYSAGHNLLKAHALAWHVYNEKFRHAQNGKISIALQADWIEPACPFSQKDKEVAERVLEFDIGWLAEPIFGSGDYPWVMRDWLNQRNNFLLPYFTEDEKKLIQGTFDFLALSHYTTILVDSEKEDPIKYNDYLEVQEMTDITWLNSPSQVAVVPWGLRKVLNWLKFKYGDLPMYIISNGIDDGLHAEDDQLRVYYMQNYINEALKAHILDGINLCGYFAYSFNDRTAPRFGLYRYAADQFEPKASMKHYRKIIDSNGFPGPETLERFCPEEFTVCTECSFFHTRKSGGHHHHHH

SEQ ID NO: 134 - protein, 8 aa, Artificial Sequence
  GG_6xHis
GGHHHHHH

SEQ ID NO: 135 - protein, 6 aa, Artificial Sequence
  6xHis
HHHHHH

SEQ ID NO: 136 - protein, 2 aa, Artificial Sequence
  GG_linker
GG

SEQ ID NO: 137 - DNA, 3654 bp, Artificial Sequence
  1_981_2xGS_linker_ IgG1-noCH1-Fc
atgcccgccagcgccccgccgcgccgcccgcggccgccgccgccgtcgctgtcgctgctgctggtgctgctgggcctgggcggccgccgcctgcgtgcggagccgggcgacggcgcgcagacctgggcccgtttctcgcggcctcctgcccccgaggccgcgggcctcttccagggcaccttccccgacggcttcctctgggccgtgggcagcgccgcctaccagaccgagggcggctggcagcagcacggcaagggtgcgtccatctgggatacgttcacccaccaccccctggcacccccgggagactcccggaacgccagtctgccgttgggcgccccgtcgccgctgcagcccgccaccggggacgtagccagcgacagctacaacaacgtcttccgcgacacggaggcgctgcgcgagctcggggtcactcactaccgcttctccatctcgtgggcgcgagtgctccccaatggcagcgcgggcgtccccaaccgcgaggggctgcgctactaccggcgcctgctggagcggctgcgggagctgggcgtgcagcccgtggtcaccctgtaccactgggacctgccccagcgcctgcaggacgcctacggcggctgggccaaccgcgccctggccgaccacttcagggattacgcggagctctgcttccgccacttcggcggtcaggtcaagtactggatcaccatcgacaacccctacgtggtggcctggcacggctacgccaccgggcgcctggcccccggcatccggggcagcccgcggctcgggtacctggtggcgcacaacctcctcctggctcatgccaaagtctggcatctctacaatacttctttccgtcccactcagggaggtcaggtgtccattgccctaagctctcactggatcaatcctcgaagaatgaccgaccacagcatcaaagaatgtcaaaaatctctggactttgtactaggttggtttgccaaacccgtatttattgatggtgactatcccgagagcatgaagaataacctttcatctattctgcctgattttactgaatctgagaaaaagttcatcaaaggaactgctgacttttttgctctttgctttggacccaccttgagttttcaacttttggaccctcacatgaagttccgccaattggaatctcccaacctgaggcaactgctttcctggattgaccttgaatttaaccatcctcaaatatttattgtggaaaatggctggtttgtctcagggaccaccaagagagatgatgccaaatatatgtattacctcaaaaagttcatcatggaaaccttaaaagccatcaagctggatggggtggatgtcatcgggtataccgcatggtccctcatggatggtttcgagtggcacagaggttacagcatcaggcgtggactcttctatgttgactttctaagccaggacaagatgttgttgccaaagtcttcagccttgttctaccaaaagctgatagagaaaaatggcttccctcctttacctgaaaatcagcccctagaagggacatttccctgtgactttgcttggggagttgttgacaactacattcaagtagataccactctgtctcagtttaccgacctgaatgtttacctgtgggatgtccaccacagtaaaaggcttattaaagtggatggggttgtgaccaagaagaggaaatcctactgtgttgactttgctgccatccagccccagatcgctttactccaggaaatgcacgttacacattttcgcttctccctggactgggccctgattctccctctgggtaaccagtcccaggtgaaccacaccatcctgcagtactatcgctgcatggccagcgagcttgtccgtgtcaacatcaccccagtggtggccctgtggcagcctatggccccgaaccaaggactgccgcgcctcctggccaggcagggcgcctgggagaacccctacactgccctggcctttgcagagtatgcccgactgtgctttcaagagctcggccatcacgtcaagctttggataacgatgaatgagccgtatacaaggaatatgacatacagtgctggccacaaccttctgaaggcccatgccctggcttggcatgtgtacaatgaaaagtttaggcatgctcagaatgggaaaatatccatagccttgcaggctgattggatagaacctgcctgccctttctcccaaaaggacaaagaggtggccgagagagttttggaatttgacattggctggctggctgagcccattttcggctctggagattatccatgggtgatgagggactggctgaaccaaagaaacaattttcttcttccttatttcactgaagatgaaaaaaagctaatccagggtacctttgactttttggctttaagccattataccaccatccttgtagactcagaaaaagaagatccaataaaatacaatgattacctagaagtgcaagaaatgaccgacatcacgtggctcaactcccccagtcaggtggcggtagtgccctgggggttgcgcaaagtgctgaactggctgaagttcaagtacggagacctccccatgtacataatatccaacggaatcgatgacgggctgcatgctgaggacgaccagctgagggtgtattatatgcagaattacataaacgaagctctcaaagcccacatactggatggtatcaatctttgcggatactttgcttattcgtttaacgaccgcacagctccgaggtttggcctctatcgttatgctgcagatcagtttgagcccaaggcatccatgaaacattacaggaaaattattgacagcaatggtttcccgggcccagaaactctggaaagattttgtccagaagaattcacagtatgtaccgaatgctcattcttccacactcgcaaatctggcggcggcgggtctggtggggggggcagtgataagacccatacgtgtccaccatgtccagcgccagaactgttgggaggcccaagtgtcttccttttcccacctaagcctaaggacaccttgatgatttcacggacacccgaggtcacgtgtgtggtggtcgatgtttcccatgaggacccagaagttaaatttaattggtatgtggatggagtcgaggtccacaacgcgaagactaagcccagagaggagcagtacaatagcacgtatagagtcgtctccgtcttgacggtacttcatcaggattggttgaatggaaaagaatacaaatgtaaggtctcaaataaagcattgcctgcaccgatcgaaaagacaatcagcaaagcgaagggacagccccgagaaccacaggtttataccctgcccccgtccagagatgaattgacaaaaaatcaggtctccttgacctgtctcgtgaaaggattctatccgagcgatatcgctgtagagtgggagagcaacggacaacctgaaaacaattacaaaacaaccccacccgttcttgactcagatggttccttctttctgtatagcaagctcactgttgataagtcacgatggcagcaaggtaatgtgttctcttgctcagttatgcacgaagcgctgcacaaccactacactcagaagtccctctccctcagtcccggaaaa

SEQ ID NO: 138 - DNA, 30 bp, Artificial Sequence
  2xGS_linker
ggcggcggcgggtctggtggggggggcagt

SEQ ID NO: 139 - DNA, 681 bp, Artificial Sequence
  IgG1-noCH1-Fc
gataagacccatacgtgtccaccatgtccagcgccagaactgttgggaggcccaagtgtcttccttttcccacctaagcctaaggacaccttgatgatttcacggacacccgaggtcacgtgtgtggtggtcgatgtttcccatgaggacccagaagttaaatttaattggtatgtggatggagtcgaggtccacaacgcgaagactaagcccagagaggagcagtacaatagcacgtatagagtcgtctccgtcttgacggtacttcatcaggattggttgaatggaaaagaatacaaatgtaaggtctcaaataaagcattgcctgcaccgatcgaaaagacaatcagcaaagcgaagggacagccccgagaaccacaggtttataccctgcccccgtccagagatgaattgacaaaaaatcaggtctccttgacctgtctcgtgaaaggattctatccgagcgatatcgctgtagagtgggagagcaacggacaacctgaaaacaattacaaaacaaccccacccgttcttgactcagatggttccttctttctgtatagcaagctcactgttgataagtcacgatggcagcaaggtaatgtgttctcttgctcagttatgcacgaagcgctgcacaaccactacactcagaagtccctctccctcagtcccggaaaa

SEQ ID NO: 140 - DNA, 1676 bp, Artificial Sequence
  wtSP_Seq6_Sc
aagcttaccgccaccatgccggcgtccgcccccccccgccgcccgaggccccccccgccctccctgtccctgctcctcgtcctgctcggcctggggggccgccggctgcgcgccgagccgggcgacggggcccagacctgggcccgcttcagcaggcccccggcccccgaggcggcgggtctgttccaggggaccttcccggacggtttcctgtgggccgtcggctccgccgcgtaccagacggagggcgggtggcaacaacacgggaagggcgcgtcgatctgggacactttcacccaccaccccctggcccccccgggggactcgcggaacgcgagcctcccgctgggcgcccccagccccctccagccggccaccggcgacgtggcgagcgacagctacaacaatgtcttcagggacaccgaggccctccgggaactcggcgtcacgcactaccgcttcagcatcagctgggcgcgggtcctgccgaacggctccgccggcgtgccgaaccgagagggcctgaggtactacaggcgcctcctggagaggctccgggagctgggcgtacagcccgtcgtcaccctctaccactgggacctcccgcagcgcctgcaggacgcgtacggggggtgggccaaccgcgccctggccgaccacttccgggactacgccgagctctgcttccgccacttcgggggccaggtcaagtactggatcaccatcgacaacccctacgtcgtggcctggcacggctacgccaccggtcgcctggccccgggcatccggggctccccgcggctgggctacctcgtcgcgcataacctgctgctcgcgcacgcgaaggtctggcacctctacaacaccagcttccggccgacccagggcggccaggtgagcatcgcgctgtcgagccactggatcaacccccgccgtatgactgaccactcgatcaaggaatgccagaagagcctggacttcgtcctggggtggttcgccaagccggtgttcatcgacggtgactacccggaatcgatgaagaacaacctgtcctcgatcctgcccgacttcaccgagtccgagaagaagttcattaagggcaccgccgacttcttcgcgctgtgcttcgggcccaccctgtccttccagctgctggacccccacatgaagttccgccagctagagtctccgaacctgcgccagctcctgtcgtggatcgacctggagttcaaccacccgcagatcttcatcgtcgagaacggctggttcgtctcggggaccaccaaacgggacgacgccaagtatatgtactacctcaagaagttcatcatggagaccctgaaggcgatcaagctggacggggtcgacgtcatcgggtacaccgcctggtccctgatggacggcttcgagtggcaccgcggctactcgatcagacgcggcctgttctacgtcgacttcctgtcgcaggacaagatgctcctgccgaagtccagcgcgctcttctaccagaagctgatcgagaagaacggcttcccaccgctgcccgagaaccagccactcgaaggcaccttcccgtgcgacttcgcctggggcgtcgtggacaactacatccaggtgtcgcagctcacgaagccgatctcctcgctcaccaagccgtaccactgataatctagagt

SEQ ID NO: 141 - DNA, 3641 bp, Artificial Sequence
  LubSP_Seq3_Sc
aagcttaccgccaccatggcctggaagactctccccatctacctcctgctgctcctgtcggtcttcgtcatccagcaggtgtcctccgagccgggcgacggcgcgcagacctgggcgcgcttcagccggccgccggccccggaggcagccggcctgttccaggggaccttcccggacggcttcctctgggccgtcggctcggccgcctaccagaccgagggtggctggcagcagcacggcaagggcgcctccatctgggacaccttcacccaccacccgctggccccgccgggcgactcccgcaacgcctccctgccgctgggcgccccctcgcccctgcagccggccaccggcgacgtggcgtcggacagctacaacaacgtgttccgcgacaccgaagccctgcgggagctgggcgtcacccactaccgcttctccatcagctgggctagggtcctgcccaacggcagcgcgggcgtgcccaaccgcgagggcctgcgttactaccggcgcctgctggagcgcctgcgcgaactcggggtccagccggtcgtcaccctctaccactgggatctgccccagcgccttcaggacgcctacggcggctgggccaaccgggccctggccgaccacttccgcgactacgccgagctctgcttccgccactttggcggccaggtcaagtactggatcaccatcgacaacccgtacgtcgtcgcctggcacggctacgcaaccggccggctggccccgggcatccgcggctccccccgcctgggctacctcgtggcgcacaacctcctgctggcccacgccaaggtgtggcacctgtacaacacctccttccgcccgacccaaggcggccaggtgtccatcgccctgtccagccactggatcaacccccggcgcatgacggaccactcgatcaaggagtgccagaagagcctcgacttcgtgctgggctggttcgcgaagccggtgttcatcgacggtgactacccggagtccatgaagaacaacctgtcctcgatcctgcccgacttcaccgagagtgagaagaagttcatcaagggcaccgccgacttcttcgcgctctgcttcggccccaccctctcgttccagctgctggacccccacatgaagttccggcagctggagagcccgaacctgcgccagctcctgagctggatcgacctcgagttcaatcacccccagatcttcatcgtggagaacggttggttcgtgagcggcaccaccaagcgcgacgacgccaaatacatgtactacctgaagaagtttatcatggagaccctgaaggcgatcaagctggacggcgtcgacgtgatcggctacaccgcctggtccctgatggacggcttcgagtggcaccgggggtacagcatccggcggggcctgttctacgtggacttcctgtcgcaggacaagatgttgctgcccaagtcgtcggccctcttctaccagaagctgatcgagaagaacggcttcccgccgctgcccgagaaccagcccctggagggcaccttcccgtgcgacttcgcctggggcgtcgtggacaactacatccaggtcgacaccaccctgagccagttcacagacctcaacgtgtacctctgggacgtgcaccacagcaaacgcctcatcaaggtcgacggcgtagtcaccaagaagcggaagagctattgcgtggacttcgccgcgattcaaccccaaatcgcgctcctccaggagatgcacgtcacccacttcaggttcagcctcgactgggcgctgatcctgccgctcgggaaccagtcgcaggtgaaccacacgatcctgcaatactacaggtgcatggcgtcggagctcgtccgggtcaacatcacccccgtggtcgccctctggcagcccatggcgcccaaccagggcctgccccgcctcctggcccgccagggcgcctgggagaacccgtacaccgcgctggccttcgcggagtacgcgcgcctctgcttccaggagctggggcaccacgtgaagctgtggatcaccatgaacgaaccctacacgcgcaacatgacatacagcgcggggcacaacctgctgaaggcacacgccctcgcgtggcacgtctacaacgaaaagttccggcacgcccagaacggcaagatctccatcgccctccaggccgactggatcgagcctgcctgcccgttctcgcagaaggacaaagaggtggccgagcgggtgctggagttcgacatcggttggctggcggagccgatcttcggctccggcgactacccctgggtcatgcgggactggctgaaccagcgcaacaacttcttgcttccctacttcaccgaagacgaaaagaagctgatccagggaaccttcgacttcctcgccctcagccactacaccaccatcttggtcgactcggagaaggaggaccccatcaagtacaacgattacctcgaggtccaggagatgacggacatcacgtggctcaactcgccgtcccaggtcgcggtggtcccctggggcctgcggaaggtgctcaactggctgaagttcaagtacggcgacctccccatgtacatcatcagcaacggaatcgacgacggcctgcacgccgaggacgaccagctccgtgtctactacatgcagaactacatcaacgaggccctgaaggcccacatcctggacggcatcaacctgtgtggttacttcgcctactcattcaacgaccgcaccgccccccggttcggcctctacaggtacgcggcggaccagttcgagcccaaggcgtcgatgaagcactaccgcaagatcatcgacagcaacggcttccccggcccggagaccctcgaacgcttctgccccgaggagttcacggtgtgcaccgagtgcagcttcttccacacccgcaagtcgggcgggggcggcagcggcggcggcggctcggacaagacccacacctgtcccccctgccccgcccccgagctgctgggtggcccgtccgtcttcctgttccccccgaagccgaaggacactctcatgatctcccggacccccgaggtcacctgcgtggtcgtagacgtgtcccacgaggacccggaggtgaagttcaactggtacgtggacggcgtggaagtccacaacgccaagaccaagccgcgcgaagagcagtacaactcgacctaccgggtcgtcagcgtcctcacggtcctgcaccaggactggctcaatgggaaggaatacaagtgcaaggtgtccaacaaggcgctgcccgcccccatcgagaagaccatcagcaaggccaaggggcagccgcgggaaccgcaggtctacacgctcccgcccagccgggacgagctcaccaagaatcaggtcagtctgacctgcctggtgaagggcttctacccgagtgacatcgccgtggagtgggagtcgaatggccagcccgagaacaactacaagacaacgccccccgtcctggactccgacggctccttcttcctgtactcgaagctcacggtcgacaagagccggtggcagcagggcaacgtgttcagctgcagcgtcatgcacgaggccctgcacaaccactacacgcagaagagcctgtcgctgtccccgggaaa

SEQ ID NO: 142 - DNA, 2972 bp, Artificial Sequence
  wtSP_Seq2_Sc
aagcttaccgccaccatgcccgcctccgcgcccccccgccgcccgcgtcctcccccgccgagcctctccctgctgctggtgctcctgggcctgggcggacgccggctccgcgccgagccgggcgacggcgcgcagacctgggcgcgcgtgagccggccgccggccccggaggcagccggcctgttccaggggaccttcccggacggcttcctctgggccgtcggctcggccgcctaccagaccgagggtggctggcagcagcacggcaagggcgcctccatctgggacaccttcacccaccacccgctggccccgccgggcgactcccgcaacgcctccctgccgctgggcgccccctcgcccctgcagccggccaccggcgacgtggcgtcggacagctacaacaacgtgttccgcgacaccgaagccctgcgggagctgggcgtcacccactaccgcttctccatcagctgggctagggtcctgcccaacggcagcgcgggcgtgcccaaccgcgagggcctgcgttactaccggcgcctgctggagcgcctgcgcgaactcggggtccagccggtcgtcaccctctaccactgggatctgccccagcgccttcaggacgcctacggcggctgggccaaccgggccctggccgaccacttccgcgactacgccgagctctgcttccgccactttggcggccaggtcaagtactggatcaccatcgacaacccgtacgtcgtcgcctggcacggctacgcaaccggccggctggccccgggcatccgcggctccccccgcctgggctacctcgtggcgcacaacctcctgctggcccacgccaaggtgtggcacctgtacaacacctccttccgcccgacccaaggcggccaggtgtccatcgccctgtccagccactggatcaacccccggcgcatgacggaccactcgatcaaggagtgccagaagagcctcgacttcgtgctgggctggttcgcgaagccggtgttcatcgacggtgactacccggagtccatgaagaacaacctgtcctcgatcctgcccgacttcaccgagagtgagaagaagttcatcaagggcaccgccgacttcttcgcgctctgcttcggccccaccctctcgttccagctgctggacccccacatgaagttccggcagctggagagcccgaacctgcgccagctcctgagctggatcgacctcgagttcaatcacccccagatcttcatcgtggagaacggttggttcgtgagcggcaccaccaagcgcgacgacgccaaatacatgtactacctgaagaagtttatcatggagaccctgaaggcgatcaagctggacggcgtcgacgtgatcggctacaccgcctggtccctgatggacggcttcgagtggcaccgggggtacagcatccggcggggcctgttctacgtggacttcctgtcgcaggacaagatgttgctgcccaagtcgtcggccctcttctaccagaagctgatcgagaagaacggcttcccgccgctgcccgagaaccagcccctggagggcaccttcccgtgcgacttcgcctggggcgtcgtggacaactacatccaggtcgacaccaccctgagccagttcacagacctcaacgtgtacctctgggacgtgcaccacagcaaacgcctcatcaaggtcgacggcgtagtcaccaagaagcggaagagctattgcgtggacttcgccgcgattcaaccccaaatcgcgctcctccaggagatgcacgtcacccacttcaggttcagcctcgactgggcgctgatcctgccgctcgggaaccagtcgcaggtgaaccacacgatcctgcaatactacaggtgcatggcgtcggagctcgtccgggtcaacatcacccccgtggtcgccctctggcagcccatggcgcccaaccagggcctgccccgcctcctggcccgccagggcgcctgggagaacccgtacaccgcgctggccttcgcggagtacgcgcgcctctgcttccaggagctggggcaccacgtgaagctgtggatcaccatgaacgaaccctacacgcgcaacatgacatacagcgcggggcacaacctgctgaaggcacacgccctcgcgtggcacgtctacaacgaaaagttccggcacgcccagaacggcaagatctccatcgccctccaggccgactggatcgagcctgcctgcccgttctcgcagaaggacaaagaggtggccgagcgggtgctggagttcgacatcggttggctggcggagccgatcttcggctccggcgactacccctgggtcatgcgggactggctgaaccagcgcaacaacttcttgcttccctacttcaccgaagacgaaaagaagctgatccagggaaccttcgacttcctcgccctcagccactacaccaccatcttggtcgactcggagaaggaggaccccatcaagtacaacgattacctcgaggtccaggagatgacggacatcacgtggctcaactcgccgtcccaggtcgcggtggtcccctggggcctgcggaaggtgctcaactggctgaagttcaagtacggcgacctccccatgtacatcatcagcaacggaatcgacgacggcctgcacgccgaggacgaccagctccgtgtctactacatgcagaactacatcaacgaggccctgaaggcccacatcctggacggcatcaacctgtgtggttacttcgcctactcattcaacgaccgcaccgccccccggttcggcctctacaggtacgcggcggaccagttcgagcccaaggcgtcgatgaagcactaccgcaagatcatcgacagcaacggcttccccggcccggagaccctcgaacgcttctgccccgaggagttcacggtgtgcaccgagtgcagcttcttccacacccgcaagtcgtgataatctagagt

SEQ ID NO: 143 - DNA, 2945 bp, Artificial Sequence
  LubSP_Seq2_Sc
aagcttaccgccaccatggcctggaagactctccccatctacctcctgctgctcctgtcggtcttcgtcatccagcaggtgtcctccgagccgggcgacggcgcgcagacctgggcgcgcgtgagccggccgccggccccggaggcagccggcctgttccaggggaccttcccggacggcttcctctgggccgtcggctcggccgcctaccagaccgagggtggctggcagcagcacggcaagggcgcctccatctgggacaccttcacccaccacccgctggccccgccgggcgactcccgcaacgcctccctgccgctgggcgccccctcgcccctgcagccggccaccggcgacgtggcgtcggacagctacaacaacgtgttccgcgacaccgaagccctgcgggagctgggcgtcacccactaccgcttctccatcagctgggctagggtcctgcccaacggcagcgcgggcgtgcccaaccgcgagggcctgcgttactaccggcgcctgctggagcgcctgcgcgaactcggggtccagccggtcgtcaccctctaccactgggatctgccccagcgccttcaggacgcctacggcggctgggccaaccgggccctggccgaccacttccgcgactacgccgagctctgcttccgccactttggcggccaggtcaagtactggatcaccatcgacaacccgtacgtcgtcgcctggcacggctacgcaaccggccggctggccccgggcatccgcggctccccccgcctgggctacctcgtggcgcacaacctcctgctggcccacgccaaggtgtggcacctgtacaacacctccttccgcccgacccaaggcggccaggtgtccatcgccctgtccagccactggatcaacccccggcgcatgacggaccactcgatcaaggagtgccagaagagcctcgacttcgtgctgggctggttcgcgaagccggtgttcatcgacggtgactacccggagtccatgaagaacaacctgtcctcgatcctgcccgacttcaccgagagtgagaagaagttcatcaagggcaccgccgacttcttcgcgctctgcttcggccccaccctctcgttccagctgctggacccccacatgaagttccggcagctggagagcccgaacctgcgccagctcctgagctggatcgacctcgagttcaatcacccccagatcttcatcgtggagaacggttggttcgtgagcggcaccaccaagcgcgacgacgccaaatacatgtactacctgaagaagtttatcatggagaccctgaaggcgatcaagctggacggcgtcgacgtgatcggctacaccgcctggtccctgatggacggcttcgagtggcaccgggggtacagcatccggcggggcctgttctacgtggacttcctgtcgcaggacaagatgttgctgcccaagtcgtcggccctcttctaccagaagctgatcgagaagaacggcttcccgccgctgcccgagaaccagcccctggagggcaccttcccgtgcgacttcgcctggggcgtcgtggacaactacatccaggtcgacaccaccctgagccagttcacagacctcaacgtgtacctctgggacgtgcaccacagcaaacgcctcatcaaggtcgacggcgtagtcaccaagaagcggaagagctattgcgtggacttcgccgcgattcaaccccaaatcgcgctcctccaggagatgcacgtcacccacttcaggttcagcctcgactgggcgctgatcctgccgctcgggaaccagtcgcaggtgaaccacacgatcctgcaatactacaggtgcatggcgtcggagctcgtccgggtcaacatcacccccgtggtcgccctctggcagcccatggcgcccaaccagggcctgccccgcctcctggcccgccagggcgcctgggagaacccgtacaccgcgctggccttcgcggagtacgcgcgcctctgcttccaggagctggggcaccacgtgaagctgtggatcaccatgaacgaaccctacacgcgcaacatgacatacagcgcggggcacaacctgctgaaggcacacgccctcgcgtggcacgtctacaacgaaaagttccggcacgcccagaacggcaagatctccatcgccctccaggccgactggatcgagcctgcctgcccgttctcgcagaaggacaaagaggtggccgagcgggtgctggagttcgacatcggttggctggcggagccgatcttcggctccggcgactacccctgggtcatgcgggactggctgaaccagcgcaacaacttcttgcttccctacttcaccgaagacgaaaagaagctgatccagggaaccttcgacttcctcgccctcagccactacaccaccatcttggtcgactcggagaaggaggaccccatcaagtacaacgattacctcgaggtccaggagatgacggacatcacgtggctcaactcgccgtcccaggtcgcggtggtcccctggggcctgcggaaggtgctcaactggctgaagttcaagtacggcgacctccccatgtacatcatcagcaacggaatcgacgacggcctgcacgccgaggacgaccagctccgtgtctactacatgcagaactacatcaacgaggccctgaaggcccacatcctggacggcatcaacctgtgtggttacttcgcctactcattcaacgaccgcaccgccccccggttcggcctctacaggtacgcggcggaccagttcgagcccaaggcgtcgatgaagcactaccgcaagatcatcgacagcaacggcttccccggcccggagaccctcgaacgcttctgccccgaggagttcacggtgtgcaccgagtgcagcttcttccacacccgcaagtcgtgataatctagagt

SEQ ID NO: 144 - DNA, 3656 bp, Artificial Sequence
  LubSP_Seq1_Sc
aagcttaccgccaccatggcctggaagactctccccatctacctcctgctgctcctgtcggtcttcgtcatccagcaggtgtcctccgagccgggcgacggcgcgcagacctgggcgcgcgtgagccggccgccggccccggaggcagccggcctgttccaggggaccttcccggacggcttcctctgggccgtcggctcggccgcctaccagaccgagggtggctggcagcagcacggcaagggcgcctccatctgggacaccttcacccaccacccgctggccccgccgggcgactcccgcaacgcctccctgccgctgggcgccccctcgcccctgcagccggccaccggcgacgtggcgtcggacagctacaacaacgtgttccgcgacaccgaagccctgcgggagctgggcgtcacccactaccgcttctccatcagctgggctagggtcctgcccaacggcagcgcgggcgtgcccaaccgcgagggcctgcgttactaccggcgcctgctggagcgcctgcgcgaactcggggtccagccggtcgtcaccctctaccactgggatctgccccagcgccttcaggacgcctacggcggctgggccaaccgggccctggccgaccacttccgcgactacgccgagctctgcttccgccactttggcggccaggtcaagtactggatcaccatcgacaacccgtacgtcgtcgcctggcacggctacgcaaccggccggctggccccgggcatccgcggctccccccgcctgggctacctcgtggcgcacaacctcctgctggcccacgccaaggtgtggcacctgtacaacacctccttccgcccgacccaaggcggccaggtgtccatcgccctgtccagccactggatcaacccccggcgcatgacggaccactcgatcaaggagtgccagaagagcctcgacttcgtgctgggctggttcgcgaagccggtgttcatcgacggtgactacccggagtccatgaagaacaacctgtcctcgatcctgcccgacttcaccgagagtgagaagaagttcatcaagggcaccgccgacttcttcgcgctctgcttcggccccaccctctcgttccagctgctggacccccacatgaagttccggcagctggagagcccgaacctgcgccagctcctgagctggatcgacctcgagttcaatcacccccagatcttcatcgtggagaacggttggttcgtgagcggcaccaccaagcgcgacgacgccaaatacatgtactacctgaagaagtttatcatggagaccctgaaggcgatcaagctggacggcgtcgacgtgatcggctacaccgcctggtccctgatggacggcttcgagtggcaccgggggtacagcatccggcggggcctgttctacgtggacttcctgtcgcaggacaagatgttgctgcccaagtcgtcggccctcttctaccagaagctgatcgagaagaacggcttcccgccgctgcccgagaaccagcccctggagggcaccttcccgtgcgacttcgcctggggcgtcgtggacaactacatccaggtcgacaccaccctgagccagttcacagacctcaacgtgtacctctgggacgtgcaccacagcaaacgcctcatcaaggtcgacggcgtagtcaccaagaagcggaagagctattgcgtggacttcgccgcgattcaaccccaaatcgcgctcctccaggagatgcacgtcacccacttcaggttcagcctcgactgggcgctgatcctgccgctcgggaaccagtcgcaggtgaaccacacgatcctgcaatactacaggtgcatggcgtcggagctcgtccgggtcaacatcacccccgtggtcgccctctggcagcccatggcgcccaaccagggcctgccccgcctcctggcccgccagggcgcctgggagaacccgtacaccgcgctggccttcgcggagtacgcgcgcctctgcttccaggagctggggcaccacgtgaagctgtggatcaccatgaacgaaccctacacgcgcaacatgacatacagcgcggggcacaacctgctgaaggcacacgccctcgcgtggcacgtctacaacgaaaagttccggcacgcccagaacggcaagatctccatcgccctccaggccgactggatcgagcctgcctgcccgttctcgcagaaggacaaagaggtggccgagcgggtgctggagttcgacatcggttggctggcggagccgatcttcggctccggcgactacccctgggtcatgcgggactggctgaaccagcgcaacaacttcttgcttccctacttcaccgaagacgaaaagaagctgatccagggaaccttcgacttcctcgccctcagccactacaccaccatcttggtcgactcggagaaggaggaccccatcaagtacaacgattacctcgaggtccaggagatgacggacatcacgtggctcaactcgccgtcccaggtcgcggtggtcccctggggcctgcggaaggtgctcaactggctgaagttcaagtacggcgacctccccatgtacatcatcagcaacggaatcgacgacggcctgcacgccgaggacgaccagctccgtgtctactacatgcagaactacatcaacgaggccctgaaggcccacatcctggacggcatcaacctgtgtggttacttcgcctactcattcaacgaccgcaccgccccccggttcggcctctacaggtacgcggcggaccagttcgagcccaaggcgtcgatgaagcactaccgcaagatcatcgacagcaacggcttccccggcccggagaccctcgaacgcttctgccccgaggagttcacggtgtgcaccgagtgcagcttcttccacacccgcaagtcgggcgggggcggcagcggcggcggcggctcggacaagacccacacctgtcccccctgccccgcccccgagctgctgggtggcccgtccgtcttcctgttccccccgaagccgaaggacactctcatgatctcccggacccccgaggtcacctgcgtggtcgtagacgtgtcccacgaggacccggaggtgaagttcaactggtacgtggacggcgtggaagtccacaacgccaagaccaagccgcgcgaagagcagtacaactcgacctaccgggtcgtcagcgtcctcacggtcctgcaccaggactggctcaatgggaaggaatacaagtgcaaggtgtccaacaaggcgctgcccgcccccatcgagaagaccatcagcaaggccaaggggcagccgcgggaaccgcaggtctacacgctcccgcccagccgggacgagctcaccaagaatcaggtcagtctgacctgcctggtgaagggcttctacccgagtgacatcgccgtggagtgggagtcgaatggccagcccgagaacaactacaagacaacgccccccgtcctggactccgacggctccttcttcctgtactcgaagctcacggtcgacaagagccggtggcagcagggcaacgtgttcagctgcagcgtcatgcacgaggccctgcacaaccactacacgcagaagagcctgtcgctgtccccgggaaagtgataatctagagt

SEQ ID NO: 145 - DNA, 2387 bp, Artificial Sequence
  wtSP_Seq5_Sc
aagcttaccgccaccatgccggcgtccgcccccccccgccgcccgaggccccccccgccctccctgtccctgctcctcgtcctgctcggcctggggggccgccggctgcgcgccgagccgggcgacggggcccagacctgggcccgcttcagcaggcccccggcccccgaggcggcgggtctgttccaggggaccttcccggacggtttcctgtgggccgtcggctccgccgcgtaccagacggagggcgggtggcaacaacacgggaagggcgcgtcgatctgggacactttcacccaccaccccctggcccccccgggggactcgcggaacgcgagcctcccgctgggcgcccccagccccctccagccggccaccggcgacgtggcgagcgacagctacaacaatgtcttcagggacaccgaggccctccgggaactcggcgtcacgcactaccgcttcagcatcagctgggcgcgggtcctgccgaacggctccgccggcgtgccgaaccgagagggcctgaggtactacaggcgcctcctggagaggctccgggagctgggcgtacagcccgtcgtcaccctctaccactgggacctcccgcagcgcctgcaggacgcgtacggggggtgggccaaccgcgccctggccgaccacttccgggactacgccgagctctgcttccgccacttcgggggccaggtcaagtactggatcaccatcgacaacccctacgtcgtggcctggcacggctacgccaccggtcgcctggccccgggcatccggggctccccgcggctgggctacctcgtcgcgcataacctgctgctcgcgcacgcgaaggtctggcacctctacaacaccagcttccggccgacccagggcggccaggtgagcatcgcgctgtcgagccactggatcaacccccgccgtatgactgaccactcgatcaaggaatgccagaagagcctggacttcgtcctggggtggttcgccaagccggtgttcatcgacggtgactacccggaatcgatgaagaacaacctgtcctcgatcctgcccgacttcaccgagtccgagaagaagttcattaagggcaccgccgacttcttcgcgctgtgcttcgggcccaccctgtccttccagctgctggacccccacatgaagttccgccagctagagtctccgaacctgcgccagctcctgtcgtggatcgacctggagttcaaccacccgcagatcttcatcgtcgagaacggctggttcgtctcggggaccaccaaacgggacgacgccaagtatatgtactacctcaagaagttcatcatggagaccctgaaggcgatcaagctggacggggtcgacgtcatcgggtacaccgcctggtccctgatggacggcttcgagtggcaccgcggctactcgatcagacgcggcctgttctacgtcgacttcctgtcgcaggacaagatgctcctgccgaagtccagcgcgctcttctaccagaagctgatcgagaagaacggcttcccaccgctgcccgagaaccagccactcgaaggcaccttcccgtgcgacttcgcctggggcgtcgtggacaactacatccaggtgtcgcagctcacgaagccgatctcctcgctcaccaagccgtaccacgggggcggcggtagcggcggcggcggctccgacaagacccacacctgcccgccgtgccccgcgcccgagctgctcggcggcccctccgtcttcctgttccctcccaagcccaaggacacgctgatgatctcccggacccccgaggtcacctgcgtcgtggtcgacgtgtcgcacgaggacccggaggtgaagttcaactggtacgtggacggtgtggaggtgcataacgccaagaccaagccgcgggaagagcagtacaactccacgtacagggtcgtctcggtgctgacggtcctgcaccaagactggctgaacggcaaggagtacaagtgcaaggtgagcaacaaggccctcccggcgcccatcgagaagaccatcagcaaggcgaagggccagccgcgggagccgcaggtctacaccctcccgccgagccgtgacgaactgaccaagaaccaggtctcgctcacgtgcctggtcaaggggttctacccgagcgacatcgccgtggagtgggaatcgaacggccagccggagaacaactacaagaccaccccgcccgtgctggacagcgacggctccttcttcctctactccaagctgaccgtcgacaagtcgcgctggcagcaagggaacgtgttctcctgctcggtcatgcacgaggccctgcacaaccactatacccaaaagagtctgtcgctgtccccggggaagtgataatctagagt

SEQ ID NO: 146 - DNA, 3683 bp, Artificial Sequence
  wtSP_Seq3_Sc
aagcttaccgccaccatgcccgcctccgcgcccccccgccgcccgcgtcctcccccgccgagcctctccctgctgctggtgctcctgggcctgggcggacgccggctccgcgccgagccgggcgacggcgcgcagacctgggcgcgcttcagccggccgccggccccggaggcagccggcctgttccaggggaccttcccggacggcttcctctgggccgtcggctcggccgcctaccagaccgagggtggctggcagcagcacggcaagggcgcctccatctgggacaccttcacccaccacccgctggccccgccgggcgactcccgcaacgcctccctgccgctgggcgccccctcgcccctgcagccggccaccggcgacgtggcgtcggacagctacaacaacgtgttccgcgacaccgaagccctgcgggagctgggcgtcacccactaccgcttctccatcagctgggctagggtcctgcccaacggcagcgcgggcgtgcccaaccgcgagggcctgcgttactaccggcgcctgctggagcgcctgcgcgaactcggggtccagccggtcgtcaccctctaccactgggatctgccccagcgccttcaggacgcctacggcggctgggccaaccgggccctggccgaccacttccgcgactacgccgagctctgcttccgccactttggcggccaggtcaagtactggatcaccatcgacaacccgtacgtcgtcgcctggcacggctacgcaaccggccggctggccccgggcatccgcggctccccccgcctgggctacctcgtggcgcacaacctcctgctggcccacgccaaggtgtggcacctgtacaacacctccttccgcccgacccaaggcggccaggtgtccatcgccctgtccagccactggatcaacccccggcgcatgacggaccactcgatcaaggagtgccagaagagcctcgacttcgtgctgggctggttcgcgaagccggtgttcatcgacggtgactacccggagtccatgaagaacaacctgtcctcgatcctgcccgacttcaccgagagtgagaagaagttcatcaagggcaccgccgacttcttcgcgctctgcttcggccccaccctctcgttccagctgctggacccccacatgaagttccggcagctggagagcccgaacctgcgccagctcctgagctggatcgacctcgagttcaatcacccccagatcttcatcgtggagaacggttggttcgtgagcggcaccaccaagcgcgacgacgccaaatacatgtactacctgaagaagtttatcatggagaccctgaaggcgatcaagctggacggcgtcgacgtgatcggctacaccgcctggtccctgatggacggcttcgagtggcaccgggggtacagcatccggcggggcctgttctacgtggacttcctgtcgcaggacaagatgttgctgcccaagtcgtcggccctcttctaccagaagctgatcgagaagaacggcttcccgccgctgcccgagaaccagcccctggagggcaccttcccgtgcgacttcgcctggggcgtcgtggacaactacatccaggtcgacaccaccctgagccagttcacagacctcaacgtgtacctctgggacgtgcaccacagcaaacgcctcatcaaggtcgacggcgtagtcaccaagaagcggaagagctattgcgtggacttcgccgcgattcaaccccaaatcgcgctcctccaggagatgcacgtcacccacttcaggttcagcctcgactgggcgctgatcctgccgctcgggaaccagtcgcaggtgaaccacacgatcctgcaatactacaggtgcatggcgtcggagctcgtccgggtcaacatcacccccgtggtcgccctctggcagcccatggcgcccaaccagggcctgccccgcctcctggcccgccagggcgcctgggagaacccgtacaccgcgctggccttcgcggagtacgcgcgcctctgcttccaggagctggggcaccacgtgaagctgtggatcaccatgaacgaaccctacacgcgcaacatgacatacagcgcggggcacaacctgctgaaggcacacgccctcgcgtggcacgtctacaacgaaaagttccggcacgcccagaacggcaagatctccatcgccctccaggccgactggatcgagcctgcctgcccgttctcgcagaaggacaaagaggtggccgagcgggtgctggagttcgacatcggttggctggcggagccgatcttcggctccggcgactacccctgggtcatgcgggactggctgaaccagcgcaacaacttcttgcttccctacttcaccgaagacgaaaagaagctgatccagggaaccttcgacttcctcgccctcagccactacaccaccatcttggtcgactcggagaaggaggaccccatcaagtacaacgattacctcgaggtccaggagatgacggacatcacgtggctcaactcgccgtcccaggtcgcggtggtcccctggggcctgcggaaggtgctcaactggctgaagttcaagtacggcgacctccccatgtacatcatcagcaacggaatcgacgacggcctgcacgccgaggacgaccagctccgtgtctactacatgcagaactacatcaacgaggccctgaaggcccacatcctggacggcatcaacctgtgtggttacttcgcctactcattcaacgaccgcaccgccccccggttcggcctctacaggtacgcggcggaccagttcgagcccaaggcgtcgatgaagcactaccgcaagatcatcgacagcaacggcttccccggcccggagaccctcgaacgcttctgccccgaggagttcacggtgtgcaccgagtgcagcttcttccacacccgcaagtcgggcgggggcggcagcggcggcggcggctcggacaagacccacacctgtcccccctgccccgcccccgagctgctgggtggcccgtccgtcttcctgttccccccgaagccgaaggacactctcatgatctcccggacccccgaggtcacctgcgtggtcgtagacgtgtcccacgaggacccggaggtgaagttcaactggtacgtggacggcgtggaagtccacaacgccaagaccaagccgcgcgaagagcagtacaactcgacctaccgggtcgtcagcgtcctcacggtcctgcaccaggactggctcaatgggaaggaatacaagtgcaaggtgtccaacaaggcgctgcccgcccccatcgagaagaccatcagcaaggccaaggggcagccgcgggaaccgcaggtctacacgctcccgcccagccgggacgagctcaccaagaatcaggtcagtctgacctgcctggtgaagggcttctacccgagtgacatcgccgtggagtgggagtcgaatggccagcccgagaacaactacaagacaacgccccccgtcctggactccgacggctccttcttcctgtactcgaagctcacggtcgacaagagccggtggcagcagggcaacgtgttcagctgcagcgtcatgcacgaggccctgcacaaccactacacgcagaagagcctgtcgctgtccccgggaaagtgataatctagagt

SEQ ID NO: 147 - DNA, 2945 bp, Artificial Sequence
  LubSP_Seq4_Sc
aagcttaccgccaccatggcctggaagactctccccatctacctcctgctgctcctgtcggtcttcgtcatccagcaggtgtcctccgagccgggcgacggcgcgcagacctgggcgcgcttcagccggccgccggccccggaggcagccggcctgttccaggggaccttcccggacggcttcctctgggccgtcggctcggccgcctaccagaccgagggtggctggcagcagcacggcaagggcgcctccatctgggacaccttcacccaccacccgctggccccgccgggcgactcccgcaacgcctccctgccgctgggcgccccctcgcccctgcagccggccaccggcgacgtggcgtcggacagctacaacaacgtgttccgcgacaccgaagccctgcgggagctgggcgtcacccactaccgcttctccatcagctgggctagggtcctgcccaacggcagcgcgggcgtgcccaaccgcgagggcctgcgttactaccggcgcctgctggagcgcctgcgcgaactcggggtccagccggtcgtcaccctctaccactgggatctgccccagcgccttcaggacgcctacggcggctgggccaaccgggccctggccgaccacttccgcgactacgccgagctctgcttccgccactttggcggccaggtcaagtactggatcaccatcgacaacccgtacgtcgtcgcctggcacggctacgcaaccggccggctggccccgggcatccgcggctccccccgcctgggctacctcgtggcgcacaacctcctgctggcccacgccaaggtgtggcacctgtacaacacctccttccgcccgacccaaggcggccaggtgtccatcgccctgtccagccactggatcaacccccggcgcatgacggaccactcgatcaaggagtgccagaagagcctcgacttcgtgctgggctggttcgcgaagccggtgttcatcgacggtgactacccggagtccatgaagaacaacctgtcctcgatcctgcccgacttcaccgagagtgagaagaagttcatcaagggcaccgccgacttcttcgcgctctgcttcggccccaccctctcgttccagctgctggacccccacatgaagttccggcagctggagagcccgaacctgcgccagctcctgagctggatcgacctcgagttcaatcacccccagatcttcatcgtggagaacggttggttcgtgagcggcaccaccaagcgcgacgacgccaaatacatgtactacctgaagaagtttatcatggagaccctgaaggcgatcaagctggacggcgtcgacgtgatcggctacaccgcctggtccctgatggacggcttcgagtggcaccgggggtacagcatccggcggggcctgttctacgtggacttcctgtcgcaggacaagatgttgctgcccaagtcgtcggccctcttctaccagaagctgatcgagaagaacggcttcccgccgctgcccgagaaccagcccctggagggcaccttcccgtgcgacttcgcctggggcgtcgtggacaactacatccaggtcgacaccaccctgagccagttcacagacctcaacgtgtacctctgggacgtgcaccacagcaaacgcctcatcaaggtcgacggcgtagtcaccaagaagcggaagagctattgcgtggacttcgccgcgattcaaccccaaatcgcgctcctccaggagatgcacgtcacccacttcaggttcagcctcgactgggcgctgatcctgccgctcgggaaccagtcgcaggtgaaccacacgatcctgcaatactacaggtgcatggcgtcggagctcgtccgggtcaacatcacccccgtggtcgccctctggcagcccatggcgcccaaccagggcctgccccgcctcctggcccgccagggcgcctgggagaacccgtacaccgcgctggccttcgcggagtacgcgcgcctctgcttccaggagctggggcaccacgtgaagctgtggatcaccatgaacgaaccctacacgcgcaacatgacatacagcgcggggcacaacctgctgaaggcacacgccctcgcgtggcacgtctacaacgaaaagttccggcacgcccagaacggcaagatctccatcgccctccaggccgactggatcgagcctgcctgcccgttctcgcagaaggacaaagaggtggccgagcgggtgctggagttcgacatcggttggctggcggagccgatcttcggctccggcgactacccctgggtcatgcgggactggctgaaccagcgcaacaacttcttgcttccctacttcaccgaagacgaaaagaagctgatccagggaaccttcgacttcctcgccctcagccactacaccaccatcttggtcgactcggagaaggaggaccccatcaagtacaacgattacctcgaggtccaggagatgacggacatcacgtggctcaactcgccgtcccaggtcgcggtggtcccctggggcctgcggaaggtgctcaactggctgaagttcaagtacggcgacctccccatgtacatcatcagcaacggaatcgacgacggcctgcacgccgaggacgaccagctccgtgtctactacatgcagaactacatcaacgaggccctgaaggcccacatcctggacggcatcaacctgtgtggttacttcgcctactcattcaacgaccgcaccgccccccggttcggcctctacaggtacgcggcggaccagttcgagcccaaggcgtcgatgaagcactaccgcaagatcatcgacagcaacggcttccccggcccggagaccctcgaacgcttctgccccgaggagttcacggtgtgcaccgagtgcagcttcttccacacccgcaagtcgtgataatctagagt

SEQ ID NO: 148 - DNA, 2360 bp, Artificial Sequence
  LubSP_Seq5_Sc
aagcttaccgccaccatggcctggaagactctccccatctacctcctgctgctcctgtcggtcttcgtcatccagcaggtgtcctccgagccgggcgacggggcccagacctgggcccgcttcagcaggcccccggcccccgaggcggcgggtctgttccaggggaccttcccggacggtttcctgtgggccgtcggctccgccgcgtaccagacggagggcgggtggcaacaacacgggaagggcgcgtcgatctgggacactttcacccaccaccccctggcccccccgggggactcgcggaacgcgagcctcccgctgggcgcccccagccccctccagccggccaccggcgacgtggcgagcgacagctacaacaatgtcttcagggacaccgaggccctccgggaactcggcgtcacgcactaccgcttcagcatcagctgggcgcgggtcctgccgaacggctccgccggcgtgccgaaccgagagggcctgaggtactacaggcgcctcctggagaggctccgggagctgggcgtacagcccgtcgtcaccctctaccactgggacctcccgcagcgcctgcaggacgcgtacggggggtgggccaaccgcgccctggccgaccacttccgggactacgccgagctctgcttccgccacttcgggggccaggtcaagtactggatcaccatcgacaacccctacgtcgtggcctggcacggctacgccaccggtcgcctggccccgggcatccggggctccccgcggctgggctacctcgtcgcgcataacctgctgctcgcgcacgcgaaggtctggcacctctacaacaccagcttccggccgacccagggcggccaggtgagcatcgcgctgtcgagccactggatcaacccccgccgtatgactgaccactcgatcaaggaatgccagaagagcctggacttcgtcctggggtggttcgccaagccggtgttcatcgacggtgactacccggaatcgatgaagaacaacctgtcctcgatcctgcccgacttcaccgagtccgagaagaagttcattaagggcaccgccgacttcttcgcgctgtgcttcgggcccaccctgtccttccagctgctggacccccacatgaagttccgccagctagagtctccgaacctgcgccagctcctgtcgtggatcgacctggagttcaaccacccgcagatcttcatcgtcgagaacggctggttcgtctcggggaccaccaaacgggacgacgccaagtatatgtactacctcaagaagttcatcatggagaccctgaaggcgatcaagctggacggggtcgacgtcatcgggtacaccgcctggtccctgatggacggcttcgagtggcaccgcggctactcgatcagacgcggcctgttctacgtcgacttcctgtcgcaggacaagatgctcctgccgaagtccagcgcgctcttctaccagaagctgatcgagaagaacggcttcccaccgctgcccgagaaccagccactcgaaggcaccttcccgtgcgacttcgcctggggcgtcgtggacaactacatccaggtgtcgcagctcacgaagccgatctcctcgctcaccaagccgtaccacgggggcggcggtagcggcggcggcggctccgacaagacccacacctgcccgccgtgccccgcgcccgagctgctcggcggcccctccgtcttcctgttccctcccaagcccaaggacacgctgatgatctcccggacccccgaggtcacctgcgtcgtggtcgacgtgtcgcacgaggacccggaggtgaagttcaactggtacgtggacggtgtggaggtgcataacgccaagaccaagccgcgggaagagcagtacaactccacgtacagggtcgtctcggtgctgacggtcctgcaccaagactggctgaacggcaaggagtacaagtgcaaggtgagcaacaaggccctcccggcgcccatcgagaagaccatcagcaaggcgaagggccagccgcgggagccgcaggtctacaccctcccgccgagccgtgacgaactgaccaagaaccaggtctcgctcacgtgcctggtcaaggggttctacccgagcgacatcgccgtggagtgggaatcgaacggccagccggagaacaactacaagaccaccccgcccgtgctggacagcgacggctccttcttcctctactccaagctgaccgtcgacaagtcgcgctggcagcaagggaacgtgttctcctgctcggtcatgcacgaggccctgcacaaccactatacccaaaagagtctgtcgctgtccccggggaagtgataatctagagt

SEQ ID NO: 149 - DNA, 3683 bp, Artificial Sequence
  wtSP_Seq1_Sc
aagcttaccgccaccatgcccgcctccgcgcccccccgccgcccgcgtcctcccccgccgagcctctccctgctgctggtgctcctgggcctgggcggacgccggctccgcgccgagccgggcgacggcgcgcagacctgggcgcgcgtgagccggccgccggccccggaggcagccggcctgttccaggggaccttcccggacggcttcctctgggccgtcggctcggccgcctaccagaccgagggtggctggcagcagcacggcaagggcgcctccatctgggacaccttcacccaccacccgctggccccgccgggcgactcccgcaacgcctccctgccgctgggcgccccctcgcccctgcagccggccaccggcgacgtggcgtcggacagctacaacaacgtgttccgcgacaccgaagccctgcgggagctgggcgtcacccactaccgcttctccatcagctgggctagggtcctgcccaacggcagcgcgggcgtgcccaaccgcgagggcctgcgttactaccggcgcctgctggagcgcctgcgcgaactcggggtccagccggtcgtcaccctctaccactgggatctgccccagcgccttcaggacgcctacggcggctgggccaaccgggccctggccgaccacttccgcgactacgccgagctctgcttccgccactttggcggccaggtcaagtactggatcaccatcgacaacccgtacgtcgtcgcctggcacggctacgcaaccggccggctggccccgggcatccgcggctccccccgcctgggctacctcgtggcgcacaacctcctgctggcccacgccaaggtgtggcacctgtacaacacctccttccgcccgacccaaggcggccaggtgtccatcgccctgtccagccactggatcaacccccggcgcatgacggaccactcgatcaaggagtgccagaagagcctcgacttcgtgctgggctggttcgcgaagccggtgttcatcgacggtgactacccggagtccatgaagaacaacctgtcctcgatcctgcccgacttcaccgagagtgagaagaagttcatcaagggcaccgccgacttcttcgcgctctgcttcggccccaccctctcgttccagctgctggacccccacatgaagttccggcagctggagagcccgaacctgcgccagctcctgagctggatcgacctcgagttcaatcacccccagatcttcatcgtggagaacggttggttcgtgagcggcaccaccaagcgcgacgacgccaaatacatgtactacctgaagaagtttatcatggagaccctgaaggcgatcaagctggacggcgtcgacgtgatcggctacaccgcctggtccctgatggacggcttcgagtggcaccgggggtacagcatccggcggggcctgttctacgtggacttcctgtcgcaggacaagatgttgctgcccaagtcgtcggccctcttctaccagaagctgatcgagaagaacggcttcccgccgctgcccgagaaccagcccctggagggcaccttcccgtgcgacttcgcctggggcgtcgtggacaactacatccaggtcgacaccaccctgagccagttcacagacctcaacgtgtacctctgggacgtgcaccacagcaaacgcctcatcaaggtcgacggcgtagtcaccaagaagcggaagagctattgcgtggacttcgccgcgattcaaccccaaatcgcgctcctccaggagatgcacgtcacccacttcaggttcagcctcgactgggcgctgatcctgccgctcgggaaccagtcgcaggtgaaccacacgatcctgcaatactacaggtgcatggcgtcggagctcgtccgggtcaacatcacccccgtggtcgccctctggcagcccatggcgcccaaccagggcctgccccgcctcctggcccgccagggcgcctgggagaacccgtacaccgcgctggccttcgcggagtacgcgcgcctctgcttccaggagctggggcaccacgtgaagctgtggatcaccatgaacgaaccctacacgcgcaacatgacatacagcgcggggcacaacctgctgaaggcacacgccctcgcgtggcacgtctacaacgaaaagttccggcacgcccagaacggcaagatctccatcgccctccaggccgactggatcgagcctgcctgcccgttctcgcagaaggacaaagaggtggccgagcgggtgctggagttcgacatcggttggctggcggagccgatcttcggctccggcgactacccctgggtcatgcgggactggctgaaccagcgcaacaacttcttgcttccctacttcaccgaagacgaaaagaagctgatccagggaaccttcgacttcctcgccctcagccactacaccaccatcttggtcgactcggagaaggaggaccccatcaagtacaacgattacctcgaggtccaggagatgacggacatcacgtggctcaactcgccgtcccaggtcgcggtggtcccctggggcctgcggaaggtgctcaactggctgaagttcaagtacggcgacctccccatgtacatcatcagcaacggaatcgacgacggcctgcacgccgaggacgaccagctccgtgtctactacatgcagaactacatcaacgaggccctgaaggcccacatcctggacggcatcaacctgtgtggttacttcgcctactcattcaacgaccgcaccgccccccggttcggcctctacaggtacgcggcggaccagttcgagcccaaggcgtcgatgaagcactaccgcaagatcatcgacagcaacggcttccccggcccggagaccctcgaacgcttctgccccgaggagttcacggtgtgcaccgagtgcagcttcttccacacccgcaagtcgggcgggggcggcagcggcggcggcggctcggacaagacccacacctgtcccccctgccccgcccccgagctgctgggtggcccgtccgtcttcctgttccccccgaagccgaaggacactctcatgatctcccggacccccgaggtcacctgcgtggtcgtagacgtgtcccacgaggacccggaggtgaagttcaactggtacgtggacggcgtggaagtccacaacgccaagaccaagccgcgcgaagagcagtacaactcgacctaccgggtcgtcagcgtcctcacggtcctgcaccaggactggctcaatgggaaggaatacaagtgcaaggtgtccaacaaggcgctgcccgcccccatcgagaagaccatcagcaaggccaaggggcagccgcgggaaccgcaggtctacacgctcccgcccagccgggacgagctcaccaagaatcaggtcagtctgacctgcctggtgaagggcttctacccgagtgacatcgccgtggagtgggagtcgaatggccagcccgagaacaactacaagacaacgccccccgtcctggactccgacggctccttcttcctgtactcgaagctcacggtcgacaagagccggtggcagcagggcaacgtgttcagctgcagcgtcatgcacgaggccctgcacaaccactacacgcagaagagcctgtcgctgtccccgggaaagtgataatctagagt

SEQ ID NO: 150 - DNA, 1649 bp, Artificial Sequence
  LubSP_Seq6_Sc
aagcttaccgccaccatggcctggaagactctccccatctacctcctgctgctcctgtcggtcttcgtcatccagcaggtgtcctccgagccgggcgacggggcccagacctgggcccgcttcagcaggcccccggcccccgaggcggcgggtctgttccaggggaccttcccggacggtttcctgtgggccgtcggctccgccgcgtaccagacggagggcgggtggcaacaacacgggaagggcgcgtcgatctgggacactttcacccaccaccccctggcccccccgggggactcgcggaacgcgagcctcccgctgggcgcccccagccccctccagccggccaccggcgacgtggcgagcgacagctacaacaatgtcttcagggacaccgaggccctccgggaactcggcgtcacgcactaccgcttcagcatcagctgggcgcgggtcctgccgaacggctccgccggcgtgccgaaccgagagggcctgaggtactacaggcgcctcctggagaggctccgggagctgggcgtacagcccgtcgtcaccctctaccactgggacctcccgcagcgcctgcaggacgcgtacggggggtgggccaaccgcgccctggccgaccacttccgggactacgccgagctctgcttccgccacttcgggggccaggtcaagtactggatcaccatcgacaacccctacgtcgtggcctggcacggctacgccaccggtcgcctggccccgggcatccggggctccccgcggctgggctacctcgtcgcgcataacctgctgctcgcgcacgcgaaggtctggcacctctacaacaccagcttccggccgacccagggcggccaggtgagcatcgcgctgtcgagccactggatcaacccccgccgtatgactgaccactcgatcaaggaatgccagaagagcctggacttcgtcctggggtggttcgccaagccggtgttcatcgacggtgactacccggaatcgatgaagaacaacctgtcctcgatcctgcccgacttcaccgagtccgagaagaagttcattaagggcaccgccgacttcttcgcgctgtgcttcgggcccaccctgtccttccagctgctggacccccacatgaagttccgccagctagagtctccgaacctgcgccagctcctgtcgtggatcgacctggagttcaaccacccgcagatcttcatcgtcgagaacggctggttcgtctcggggaccaccaaacgggacgacgccaagtatatgtactacctcaagaagttcatcatggagaccctgaaggcgatcaagctggacggggtcgacgtcatcgggtacaccgcctggtccctgatggacggcttcgagtggcaccgcggctactcgatcagacgcggcctgttctacgtcgacttcctgtcgcaggacaagatgctcctgccgaagtccagcgcgctcttctaccagaagctgatcgagaagaacggcttcccaccgctgcccgagaaccagccactcgaaggcaccttcccgtgcgacttcgcctggggcgtcgtggacaactacatccaggtgtcgcagctcacgaagccgatctcctcgctcaccaagccgtaccactgataatctagagt

SEQ ID NO: 151 - DNA, 2972 bp, Artificial Sequence
  wtSP_Seq4_Sc
aagcttaccgccaccatgcccgcctccgcgcccccccgccgcccgcgtcctcccccgccgagcctctccctgctgctggtgctcctgggcctgggcggacgccggctccgcgccgagccgggcgacggcgcgcagacctgggcgcgcttcagccggccgccggccccggaggcagccggcctgttccaggggaccttcccggacggcttcctctgggccgtcggctcggccgcctaccagaccgagggtggctggcagcagcacggcaagggcgcctccatctgggacaccttcacccaccacccgctggccccgccgggcgactcccgcaacgcctccctgccgctgggcgccccctcgcccctgcagccggccaccggcgacgtggcgtcggacagctacaacaacgtgttccgcgacaccgaagccctgcgggagctgggcgtcacccactaccgcttctccatcagctgggctagggtcctgcccaacggcagcgcgggcgtgcccaaccgcgagggcctgcgttactaccggcgcctgctggagcgcctgcgcgaactcggggtccagccggtcgtcaccctctaccactgggatctgccccagcgccttcaggacgcctacggcggctgggccaaccgggccctggccgaccacttccgcgactacgccgagctctgcttccgccactttggcggccaggtcaagtactggatcaccatcgacaacccgtacgtcgtcgcctggcacggctacgcaaccggccggctggccccgggcatccgcggctccccccgcctgggctacctcgtggcgcacaacctcctgctggcccacgccaaggtgtggcacctgtacaacacctccttccgcccgacccaaggcggccaggtgtccatcgccctgtccagccactggatcaacccccggcgcatgacggaccactcgatcaaggagtgccagaagagcctcgacttcgtgctgggctggttcgcgaagccggtgttcatcgacggtgactacccggagtccatgaagaacaacctgtcctcgatcctgcccgacttcaccgagagtgagaagaagttcatcaagggcaccgccgacttcttcgcgctctgcttcggccccaccctctcgttccagctgctggacccccacatgaagttccggcagctggagagcccgaacctgcgccagctcctgagctggatcgacctcgagttcaatcacccccagatcttcatcgtggagaacggttggttcgtgagcggcaccaccaagcgcgacgacgccaaatacatgtactacctgaagaagtttatcatggagaccctgaaggcgatcaagctggacggcgtcgacgtgatcggctacaccgcctggtccctgatggacggcttcgagtggcaccgggggtacagcatccggcggggcctgttctacgtggacttcctgtcgcaggacaagatgttgctgcccaagtcgtcggccctcttctaccagaagctgatcgagaagaacggcttcccgccgctgcccgagaaccagcccctggagggcaccttcccgtgcgacttcgcctggggcgtcgtggacaactacatccaggtcgacaccaccctgagccagttcacagacctcaacgtgtacctctgggacgtgcaccacagcaaacgcctcatcaaggtcgacggcgtagtcaccaagaagcggaagagctattgcgtggacttcgccgcgattcaaccccaaatcgcgctcctccaggagatgcacgtcacccacttcaggttcagcctcgactgggcgctgatcctgccgctcgggaaccagtcgcaggtgaaccacacgatcctgcaatactacaggtgcatggcgtcggagctcgtccgggtcaacatcacccccgtggtcgccctctggcagcccatggcgcccaaccagggcctgccccgcctcctggcccgccagggcgcctgggagaacccgtacaccgcgctggccttcgcggagtacgcgcgcctctgcttccaggagctggggcaccacgtgaagctgtggatcaccatgaacgaaccctacacgcgcaacatgacatacagcgcggggcacaacctgctgaaggcacacgccctcgcgtggcacgtctacaacgaaaagttccggcacgcccagaacggcaagatctccatcgccctccaggccgactggatcgagcctgcctgcccgttctcgcagaaggacaaagaggtggccgagcgggtgctggagttcgacatcggttggctggcggagccgatcttcggctccggcgactacccctgggtcatgcgggactggctgaaccagcgcaacaacttcttgcttccctacttcaccgaagacgaaaagaagctgatccagggaaccttcgacttcctcgccctcagccactacaccaccatcttggtcgactcggagaaggaggaccccatcaagtacaacgattacctcgaggtccaggagatgacggacatcacgtggctcaactcgccgtcccaggtcgcggtggtcccctggggcctgcggaaggtgctcaactggctgaagttcaagtacggcgacctccccatgtacatcatcagcaacggaatcgacgacggcctgcacgccgaggacgaccagctccgtgtctactacatgcagaactacatcaacgaggccctgaaggcccacatcctggacggcatcaacctgtgtggttacttcgcctactcattcaacgaccgcaccgccccccggttcggcctctacaggtacgcggcggaccagttcgagcccaaggcgtcgatgaagcactaccgcaagatcatcgacagcaacggcttccccggcccggagaccctcgaacgcttctgccccgaggagttcacggtgtgcaccgagtgcagcttcttccacacccgcaagtcgtgataatctagagt

SEQ ID NO: 152 - protein, 1098 aa, Artificial Sequence
  Protein_1_549_Variant
MPASAPPRRPRPPPPSLSLLLVLLGLGGRRLRAEPGDGAQTWARFSRPPAPEAAGLFQGTFPDGFLWAVGSAAYQTEGGWQQHGKGASIWDTFTHHPLAPPGDSRNASLPLGAPSPLQPATGDVASDSYNNVFRDTEALRELGVTHYRFSISWARVLPNGSAGVPNREGLRYYRRLLERLRELGVQPVVTLYHWDLPQRLQDAYGGWANRALADHFRDYAELCFRHFGGQVKYWITIDNPYVVAWHGYATGRLAPGIRGSPRLGYLVAHNLLLAHAKVWHLYNTSFRPTQGGQVSIALSSHWINPRRMTDHSIKECQKSLDFVLGWFAKPVFIDGDYPESMKNNLSSILPDFTESEKKFIKGTADFFALCFGPTLSFQLLDPHMKFRQLESPNLRQLLSWIDLEFNHPQIFIVENGWFVSGTTKRDDAKYMYYLKKFIMETLKAMPASAPPRRPRPPPPSLSLLLVLLGLGGRRLRAEPGDGAQTWARFSRPPAPEAAGLFQGTFPDGFLWAVGSAAYQTEGGWQQHGKGASIWDTFTHHPLAPPGDSRNASLPLGAPSPLQPATGDVASDSYNNVFRDTEALRELGVTHYRFSISWARVLPNGSAGVPNREGLRYYRRLLERLRELGVQPVVTLYHWDLPQRLQDAYGGWANRALADHFRDYAELCFRHFGGQVKYWITIDNPYVVAWHGYATGRLAPGIRGSPRLGYLVAHNLLLAHAKVWHLYNTSFRPTQGGQVSIALSSHWINPRRMTDHSIKECQKSLDFVLGWFAKPVFIDGDYPESMKNNLSSILPDFTESEKKFIKGTADFFALCFGPTLSFQLLDPHMKFRQLESPNLRQLLSWIDLEFNHPQIFIVENGWFVSGTTKRDDAKYMYYLKKFIMETLKAIKLDGVDVIGYTAWSLMDGFEWHRGYSIRRGLFYVDFLSQDKMLLPKSSALFYQKLIEKNGFPPLPENQPLEGTFPCDFAWGVVDNYIQVSQLTKPISSLTKPYHIKLDGVDVIGYTAWSLMDGFEWHRGYSIRRGLFYVDFLSQDKMLLPKSSALFYQKLIEKNGFPPLPENQPLEGTFPCDFAWGVVDNYIQVSQLTKPISSLTKPYH
